(19) United States
(12) Patent Application Publication
(10) Pub. No.: US 2003/0055236 A1
(43) Pub. Date: Mar. 20, 2003

(54) Secreted protein HKABT24

(75) Inventors: Paul A. Moore, Germantown, MD (US); Steven M. Ruben, Olney, MD (US); Kenneth C. Carter, North Potomac, MD (US); Yanggu Shi, Gaithersburg, MD (US); Craig A. Rosen, Laytonsville, MD (US); Daniel R. Soppet, Centreville, VA (US); Hla Kyaw, Frederick, MD (US); Ying-Feig Wei, Berkeley, CA (US); Kimberly A. Florence, Rockville, MD (US); D. Roxanne Duan, Bethesda, MD (US); Charles Florence, Rockville, MD (US); John M. Greene, Gaithersburg, MD (US); Ping Feng, Gaithersburg, MD (US); Ann M. Ferrie, Painted Post, NY (US); Guo-Liang Yu, Berkeley, CA (US); Fouad Janat, Westerly, RI (US); Jian Ni, Germantown, MD (US)

Correspondence Address: HUMAN GENOME SCIENCES INC, 9410 KEY WEST AVENUE, ROCKVILLE, MD, 20850

(73) Assignee: Human Genome Sciences, Inc., Rockville, MD (US)

(21) Appl. No.: 10/097,065

(22) Filed: Mar. 14, 2002

Related U.S. Application Data
(62) Division of application No. 09/334,595, filed on Jun. 17, 1999.
Application No. 09/334,595 is a continuation-in-part of application No. PCT/US98/27059, filed on Dec. 17, 1998.
(60) Provisional application No. 60/070,923, filed on Dec. 18, 1997.
(60) Provisional application No. 60/068,007, filed on Dec. 18, 1997.
(60) Provisional application No. 60/068,057, filed on Dec. 18, 1997.
(60) Provisional application No. 60/068,006, filed on Dec. 18, 1997.
(60) Provisional application No. 60/068,053, filed on Dec. 18, 1997.
(60) Provisional application No. 60/068,064, filed on Dec. 18, 1997.
(60) Provisional application No. 60/068,054, filed on Dec. 18, 1997.
(60) Provisional application No. 60/068,008, filed on Dec. 18, 1997.
(60) Provisional application No. 60/068,369, filed on Dec. 19, 1997.
(60) Provisional application No. 60/068,367, filed on Dec. 19, 1997.
(60) Provisional application No. 60/068,368, filed on Dec. 19, 1997.
(60) Provisional application No. 60/068,169, filed on Dec. 19, 1997.
(60) Provisional application No. 60/068,365, filed on Dec. 19, 1997.

(51) Int. Cl. C07H 21/04; C12N 9/00; C12P 21/02; C12N 5/06

(52) U.S. Cl. 536/23.2; 435/69.1; 435/183; 435/325; 435/320.1

(57) ABSTRACT

The present invention relates to novel human secreted proteins and isolated nucleic acids containing the coding regions of the genes encoding such proteins. Also provided are vectors, host cells, antibodies, and recombinant methods for producing human secreted proteins. The invention further relates to diagnostic and therapeutic methods useful for diagnosing and treating disorders related to these novel human secreted proteins.

### FIELD OF THE INVENTION

[0001] This invention relates to newly identified polynucleotides and the polypeptides encoded by these polynucleotides, uses of such polynucleotides and polypeptides, and their production.

### BACKGROUND OF THE INVENTION

[0002] Unlike bacterium, which exist as a single compartment surrounded by a membrane, human cells and other eucaryotes are subdivided by membranes into many functionally distinct compartments. Each membrane-bounded compartment, or organelle, contains different proteins essential for the function of the organelle. The cell uses “sorting signals,” which are amino acid motifs located within the protein, to target proteins to particular cellular organelles.

[0003] One type of sorting signal, called a signal sequence, a signal peptide, or a leader sequence, directs a class of proteins to an organelle called the endoplasmic reticulum (ER). The ER separates the membrane-bounded proteins from all other types of proteins. Once localized to the ER, both groups of proteins can be further directed to another organelle called the Golgi apparatus. Here, the Golgi distributes the proteins to vesicles, including secretory vesicles, the cell membrane, lysosomes, and the other organelles.

[0004] Proteins targeted to the ER by a signal sequence can be released into the extracellular space as a secreted protein. For example, vesicles containing secreted proteins can fuse with the cell membrane and release their contents into the extracellular space—a process called exocytosis. Exocytosis can occur constitutively or after receipt of a triggering signal. In the latter case, the proteins are stored in secretory vesicles (or secretory granules) until exocytosis is triggered. Similarly, proteins residing on the cell membrane can also be secreted into the extracellular space by proteolytic cleavage of a “linker” holding the protein to the membrane.

[0005] Despite the great progress made in recent years, only a small number of genes encoding human secreted proteins have been identified. These secreted proteins include the commercially valuable human insulin, interferon, Factor VIII, human growth hormone, tissue plasminogen activator, and erythropoeitin. Thus, in light of the pervasive role of secreted proteins in human physiology, a need exists for identifying and characterizing novel human secreted proteins and the genes that encode them. This knowledge will allow one to detect, to treat, and to prevent medical disorders by using secreted proteins or the genes that encode them.

### SUMMARY OF THE INVENTION

[0006] The present invention relates to novel polynucleotides and the encoded polypeptides. Moreover, the present invention relates to vectors, host cells, antibodies, and recombinant methods for producing the polypeptides and polynucleotides. Also provided are diagnostic methods for detecting disorders related to the polypeptides, and therapeutic methods for treating such disorders. The invention further relates to screening methods for identifying binding partners of the polypeptides.

### DETAILED DESCRIPTION

[0007] Definitions

[0008] The following definitions are provided to facilitate understanding of certain terms used throughout this specification.

[0009] In the present invention, “isolated” refers to material removed from its original environment (e.g., the natural environment if it is naturally occurring), and thus is altered “by the hand of man” from its natural state. For example, an isolated polynucleotide could be part of a vector or a composition of matter, or could be contained within a cell, and still be “isolated” because that vector, composition of matter, or particular cell is not the original environment of the polynucleotide.

[0010] In the present invention, a “secreted” protein refers to those proteins capable of being directed to the ER, secretory vesicles, or the extracellular space as a result of a signal sequence, as well as those proteins released into the extracellular space without necessarily containing a signal sequence. If the secreted protein is released into the extracellular space, the secreted protein can undergo extracellular processing to produce a “mature” protein. Release into the extracellular space can occur by many mechanisms, including exocytosis and proteolytic cleavage.

[0011] In specific embodiments, the polynucleotides of the invention are less than 300 kb, 200 kb, 100 kb, 50 kb, 15 kb, 10 kb, or 7.5 kb in length. In a further embodiment, polynucleotides of the invention comprise at least 15 contiguous nucleotides of the coding sequence, but do not comprise all or a portion of any intron. In another embodiment, the nucleic acid comprising the coding sequence does not contain coding sequences of a genomic flanking gene (i.e., 5′ or 3′ to the gene in the genome).

[0012] As used herein, a “polynucleotide” refers to a molecule having a nucleic acid sequence contained in SEQ ID NO:X or the cDNA contained within the clone deposited with the ATCC. For example, the polynucleotide can contain the nucleotide sequence of the full length cDNA sequence, including the 5′ and 3′ untranslated sequences, the coding region, with or without the signal sequence, the secreted protein coding region, as well as fragments, epitopes, domains, and variants of the nucleic acid sequence. Moreover, as used herein, a “polypeptide” refers to a molecule having the translated amino acid sequence generated from the polynucleotide as broadly defined.

[0013] In the present invention, the full length sequence identified as SEQ ID NO:X was often generated by overlapping sequences contained in multiple clones (contig analysis). A representative clone containing all or most of the sequence for SEQ ID NO:X was deposited with the American Type Culture Collection (“ATCC”). As shown in Table 1, each clone is identified by a cDNA Clone ID (Identifier) and the ATCC Deposit Number. The ATCC is located at 10801 University Boulevard, Manassas, Va. 20110-2209, USA. The ATCC deposit was made pursuant to the terms of the Budapest Treaty on the international recognition of the deposit of microorganisms for purposes of patent procedure.

[0014] A “polynucleotide” of the present invention also includes those polynucleotides capable of hybtidizing, under stringent hybridization conditions, to sequences contained in SEQ ID NO:X, the complement thereof, or the cDNA within the clone deposited with the ATCC. “Stringent hybridization conditions” refers to an overnight incubation at 42° C. in a solution comprising 50% formamide, 5×SSC (750 mM NaCl, 75 mM sodium citrate), 50 mM sodium phosphate (pH 7.6), 5×Denhardt's solution, 10% dextran sulfate, and 20 μg/ml denatured, sheared salmon sperm DNA, followed by washing the filters in 0.1×SSC at about 65° C.

[0015] Also contemplated are nucleic acid molecules that hybridize to the polynucleotides of the present invention at lower stringency hybridization conditions. Changes in the stringency of hybridization and signal detection are primarily accomplished through the manipulation of formamide concentration (lower percentages of formnamide result in lowered stringency); salt conditions, or temperature. For example, lower stringency conditions include an overnight incubation at 37° C. in a solution comprising 6×SSPE (20×SSPE=3M NaCl; 0.2M NaH₂PO₄; 0.02M EDTA, pH 7.4), 0.5% SDS, 30% formamide, 100 ug/ml salmon sperm blocking DNA; followed by washes at 50° C. with 1×SSPE, 0.1% SDS. In addition, to achieve even lower stringency, washes performed following stringent hybridization can be done at higher salt concentrations (e.g. 5×SSC).

[0016] Note that variations in the above conditions may be accomplished through the inclusion and/or substitution of alternate blocking reagents used to suppress background in hybridization experiments. Typical blocking reagents include Denhardt's reagent, BLOTTO, heparin, denatured salmon sperm DNA, and commercially available proprietary formulations. The inclusion of specific blocking reagents may require modification of the hybridization conditions described above, due to problems with compatibility.

[0017] Of course, a polynucleotide which hybridizes only to polyA+sequences (such as any 3′ terminal polyA+tract of a cDNA shown in the sequence listing), or to a complementary stretch of T (or U) residues, would not be included in the definition of “polynucleotide,” since such a polynucleotide would hybridize to any nucleic acid molecule containing a poly (A) stretch or the complement thereof (e.g., practically any double-stranded cDNA clone).

[0018] The polynucleotide of the present invention can be composed of any polyribonucleotide or polydeoxribonucleotide, which may be unmodified RNA or DNA or modified RNA or DNA. For example, polynucleotides can be composed of single- and double-stranded DNA, DNA that is a mixture of single- and double-stranded regions, single- and double-stranded RNA, and RNA that is mixture of single- and double-stranded regions, hybrid molecules comprising DNA and RNA that may be single-stranded or, more typically, double-stranded or a mixture of single- and double-stranded regions. In addition, the polynucleotide can be composed of triple-stranded regions comprising RNA or DNA or both RNA and DNA. A polynucleotide may also contain one or more modified bases or DNA or RNA backbones modified for stability or for other reasons. “Modified” bases include, for example, tritylated bases and unusual bases such as inosine. A variety of modifications can be made to DNA and RNA; thus, “polynucleotide” embraces chemically, enzymatically, or metabolically modified forms.

[0019] The polypeptide of the present invention can be composed of amino acids joined to each other by peptide bonds or modified peptide bonds, i.e., peptide isosteres, and may contain amino acids other than the 20 gene-encoded amino acids. The polypeptides may be modified by either natural processes, such as posttranslational processing, or by chemical modification techniques which are well known in the art. Such modifications are well described in basic texts and in more detailed monographs, as well as in a voluminous research literature. Modifications can occur anywhere in a polypeptide, including the peptide backbone, the amino acid side-chains and the amino or carboxyl termini. It will be appreciated that the same type of modification may be present in the same or varying degrees at several sites in a given polypeptide. Also, a given polypeptide may contain many types of modifications. Polypeptides may be branched, for example, as a result of ubiquitination, and they may be cyclic, with or without branching. Cyclic, branched, and branched cyclic polypeptides may result from posttranslation natural processes or may be made by synthetic methods. Modifications include acetylation, acylation, ADP-ribosylation, amidation, covalent attachment of flavin, covalent attachment of a heme moiety, covalent attachment of a nucleotide or nucleotide derivative, covalent attachment of a lipid or lipid derivative, covalent attachment of phosphotidylinositol, cross-linking, cyclization, disulfide bond formation, demethylation, formation of covalent cross-links, formation of cysteine, formation of pyroglutamate, formylation, gamma-carboxylation, glycosylation, GPI anchor formation, hydroxylation, iodination, methylation, myristoylation, oxidation, pegylation, proteolytic processing, phosphorylation, prenylation, racemization, selenoylation, sulfation, transfer-RNA mediated addition of amino acids to proteins such as arginylation, and ubiquitination. (See, for instance, PROTEINS—STRUCTURE AND MOLECULAR PROPERTIES, 2nd Ed., T. E. Creighton, W. H. Freeman and Company, New York (1993); POSTTRANSLATIONAL COVALENT MODIFICATION OF PROTEINS, B. C. Johnson, Ed., Academic Press, New York, pgs. 1-12 (1983); Seifter et al., Meth Enzymol 182:626-646 (1990); Rattan et al., Ann NY Acad Sci 663:48-62 (1992).)

[0020] “SEQ ID NO:X” refers to a polynucleotide sequence while “SEQ ID NO:Y” refers to a polypeptide sequence, both sequences identified by an integer specified in Table 1.

[0021] “A polypeptide having biological activity” refers to polypeptides exhibiting activity similar, but not necessarily identical to, an activity of a polypeptide of the present invention, including mature forms, as measured in a particular biological assay, with or without dose dependency. In the case where dose dependency does exist, it need not be identical to that of the polypeptide, but rather substantially similar to the dose-dependence in a given activity as compared to the polypeptide of the present invention (i.e., the candidate polypeptide will exhibit greater activity or not more than about 25-fold less and, preferably, not more than about tenfold less activity, and most preferably, not more than about three-fold less activity relative to the polypeptide of the present invention.)

[0022] Polynucleotides and Polypeptides of the Invention

[0023] Features of Protein Encoded by Gene No: 1

[0024] The translation product of this gene shares sequence homology with “neurogenic secreted signaling protein (brn)” (see gi|1150971) from Drosophila melanogaster which is thought to be important in the normal development of brain tissue.

[0025] Preferred polypeptides of the invention comprise the following amino acid sequence: PGRPTRPAXAGLSSGGAAQEAPQADPRPWLAR (SEQ ID NO:259). Polynucleotides encoding these polypeptides are also provided.

[0026] This gene is expressed primarily in the placenta and early embryonic tissue. Northern data has demonstrated that This gene is expressed in brain, stomach and colorectal adenocarcinoma.

[0027] Therefore, polynucleotides and polypeptides of the invention are useful as reagents for differential identification of the tissue(s) or cell type(s) present in a biological sample and for diagnosis of diseases and conditions which include, but are not limited to, several types of disorders of the brain including epilepsy, mood disorders, any of a variety of types of mental retardation, and addictive disorders including alcohlism. Similarly, polypeptides and antibodies directed to these polypeptides are useful in providing immunological probes for differential identification of the tissue(s) or cell type(s). For a number of disorders of the above tissues or cells, particularly of the central nervous system, expression of this gene at significantly higher or lower levels is routinely detected in certain tissues or cell types (e.g., brain, stomach, colon, placental, embryonic, cancerous and wounded tissues) or bodily fluids (e.g., serum, plasma, urine, synovial fluid and spinal fluid) or another tissue or cell sample taken from an individual having such a disorder, relative to the standard gene expression level, i.e., the expression level in healthy tissue or bodily fluid from an individual not having the disorder.

[0028] Preferred polypeptides of the present invention comprise immunogenic epitopes shown in SEQ ID NO: 135 as residues: Gln-37 to Ala-42, Thr-51 to Ala-57, Pro-71 to His-79, Glu-124 to Arg-137, Ser-151 to Val-159. Polynucleotides encoding said polypeptides are also provided.

[0029] The tissue distribution and homology to Drosophila melanogaster putative neurogenic secreted signaling protein (brn) indicates polynucleotides and polypeptides corresponding to this gene are useful for the treatment of various brain disorders as well as pre-natal testing for neuropathological conditions, such as Alzheimer's Disease, Parlinson's Disease, Huntington's Disease, Tourette Syndrome, schizophrenia, mania, dementia, paranoia. obsessive compulsive disorder, panic disorder, learning disabilities, ALS, psychoses, autism, and altered behaviors, including disorders in feeding, sleep patterns, balance, and perception. In addition, the gene or gene product may also play a role in the treatment and/or detection of developmental disorders associated with the developing embryo, or sexually-linked disorders. Furthermore, the tissue distribution indicates polynucleotides and polypeptides corresponding to this gene are useful for the diagnosis and/or treatment of disorders of the placenta. Specific expression within the placenta indicates that this gene product may play a role in the proper establishment and maintenance of placental function. Alternately, this gene product is produced by the placenta and then transported to the embryo, where it may play a crucial role in the development and/or survival of the developing embryo or fetus. Expression of this gene product in a vascular-rich tissue such as the placenta also indicates that this gene product is produced more generally in endothelial cells or within the circulation. In such instances, it may play more generalized roles in vascular function, such as in angiogenesis. It may also be produced in the vasculature and have effects on other cells within the circulation, such as hematopoietic cells. It may serve to promote the proliferation, survival, activation, and/or differentiation of hematopoietic cells, as well as other cells throughout the body. Protein, as well as, antibodies directed against the protein may show utility as a tumor marker and/or immunotherapy targets for the above listed tissues.

[0030] Many polynucleotide sequences, such as EST sequences, are publicly available and accessible through sequence databases. Some of these sequences are related to SEQ ID NO:11 and may have been publicly available prior to conception of the present invention. Preferably, such related polynucleotides are specifically excluded from the scope of the present invention. To list every related sequence is cumbersome. Accordingly, preferably excluded from the present invention are one or more polynucleotides comprising a nucleotide sequence described by the general formula of a−b, where a is any integer between 1 to 845 of SEQ ID NO:11, b is an integer of 15 to 859, where both a and b correspond to the positions of nucleotide residues shown in SEQ ID NO:11, and where b is greater than or equal to a+14.

[0031] Features of Protein Encoded by Gene No: 2

[0032] The translation product of this gene shares sequence homology with a fat-specific secreted protein.

[0033] This gene is expressed primarily in the epididymus.

[0034] Therefore, polynucleotides and polypeptides of the invention are useful as reagents for differential identification of the tissue(s) or cell type(s) present in a biological sample and for diagnosis of diseases and conditions which include, but are not limited to, metabolic disorders and male infertility. Similarly, polypeptides and antibodies directed to these polypeptides are useful in providing immunological probes for differential identification of the tissue(s) or cell type(s). For a number of disorders of the above tissues or cells, particularly of the metabolic and reproductive systems, expression of this gene at significantly higher or lower levels is routinely detected in certain tissues or cell types (e.g., epididymus, cancerous and wounded tissues) or bodily fluids (e.g., serum, plasma, urine, synovial fluid and spinal fluid) or another tissue or cell sample taken from an individual having such a disorder, relative to the standard gene expression level, i.e., the expression level in healthy tissue or bodily fluid from an individual not having the disorder.

[0035] Preferred polypeptides of the present invention comprise immunogenic epitopes shown in SEQ ID NO: 136 as residues: Tyr-21 to Asp-40, Ser-58 to Arg-64, Thr-71 to Ser-76, Ser-106 to Thr-112. Polynucleotides encoding said polypeptides are also provided. Homology to a fat-specific gene indicates that this gene may also play a role in the treatment and/or detection of metabolic disorders such as obesity, diabetes, anorexia nervosa and bulemia. In addition, its expression primarily in the epididymus indicates a role in the treatment/detection of male fertility disorders such as infertility, low sperm count, spermatorrhea and spermiation. Protein, as well as, antibodies directed against the protein may show utility as a tumor marker and/or immunotherapy targets for the above listed tissues.

[0036] Many polynucleotide sequences, such as EST sequences, are publicly available and accessible through sequence databases. Some of these sequences are related to SEQ ID NO:12 and may have been publicly available prior to conception of the present invention. Preferably, such related polynucleotides are specifically excluded from the scope of the present invention. To list every related sequence is cumbersome. Accordingly, preferably excluded from the present invention are one or more polynucleotides comprising a nucleotide sequence described by the general forrnula of a−b, where a is any integer between 1 to 1115 of SEQ ID NO:12, b is an integer of 15 to 1129, where both a and b correspond to the positions of nucleotide residues shown in SEQ ID NO:12, and where b is greater than or equal to a+14.

[0037] Features of Protein Encoded by Gene No: 3

[0038] The translation product of this gene shares sequence homology with a neurogenic secreted signaling protein (See, e.g., Genbank Accession No. gb|AAA85211.1|; all references available through this accession are hereby incorporated by reference herein), in addition to the human UDP-galactose: 2-acetarnido-2-deoxy-D-glucose3beta-galactosyltransferase (See, e.g., Genbank Accession No. gnl|PID|e1237254; all references available through this accession are hereby incorporated by reference herein) which is thought to be vital in glycoprotein biosynthesis.

[0039] Preferred polypeptides of the invention comprise the following amino acid sequence: GLGPAQVALSLQGPA (SEQ ID NO:260), SSWMAGTQPRTSWWEMSSAKPCPTGTLRSNTSSHPQCTGPPTTHPMLVGEDMSCPEPQCGASRLSWKML NSSPLMMSLWVCA (SEQ ID NO:261), QPRTSWWEMSSAKPCPTGTLRSN (SEQ ID NO:262), MSCPEPQCGASRLSWKMLNSSPL (SEQ ID NO:263), WVALYIEGGMKYLTLVFLLGRAWRMTSPTRRSWAGSQPSRNSNTLGTWTKTSSSPFSMKWAWGQAATTQ RCRCSSLSVRLKKSSVKSHWRMSSNSLLS (SEQ ID NO:264), GGMKYLTLVFLLGRAWRMTS (SEQ ID NO:265), SQPSRNSNTLGT WTKTSSSPFSMKW (SEQ ID NO:266), and/or TTQRCRCSSLSVRLKKSSVKSHWRMS (SEQ ID NO:267). Polynucleotides encoding these polypeptides are also provided.

[0040] The gene encoding the disclosed cDNA is believed to reside on chromosome 12. Accordingly, polynucleotides related to this invention are useful as a marker in linkage analysis for chromosome 12.

[0041] This gene is expressed primarily in human fetal brain, epileptic frontal cortex and 12 week old early stage human.

[0042] Therefore, polynucleotides and polypeptides of the invention are useful as reagents for differential identification of the tissue(s) or cell type(s) present in a biological sample and for diagnosis of diseases and conditions which include, but are not limited to, neural or immune disorders, particularly neurodegenerative conditions such as epilepsy. Similarly, polypeptides and antibodies directed to these polypeptides are useful in providing immunological probes for differential identification of the tissue(s) or cell type(s). For a number of disorders of the above tissues or cells, particularly of the central nervous system, expression of this gene at significantly higher or lower levels is routinely detected in certain tissues or cell types (e.g., neural, immune, hematopoietic, and cancerous and wounded tissues) or bodily fluids (e.g., lymph, serum, plasma, urine, synovial fluid and spinal fluid) or another tissue or cell sample taken from an individual having such a disorder, relative to the standard gene expression level, i.e., the expression level in healthy tissue or bodily fluid from an individual not having the disorder.

[0043] Preferred polypeptides of the present invention comprise immunogenic epitopes shown in SEQ ID NO: 137 as residues: Ala-27 to Ser-38, Pro-43 to Asn-54, Thr-115 to Asp-121, Leu-225 to Val-232, Pro-247 to Gly-252, Arg-306 to Leu-311. Polynucleotides encoding said polypeptides are also provided.

[0044] The tissue distribution in fetal brain tissue, combined with the homology to a neurogenic secreted signaling protein, in addition to the conserved UDP-galactose:2-acetamido-2-deoxy-D-glucose3beta-galactosyltransferase protein indicates polynucleotides and polypeptides corresponding to this gene are useful for the treatment, detection, and/or prevention of a variety of neural disorders, particularly epilepsy and other disorders of the CNS.

[0045] Moreover, polynucleotides and polypeptides corresponding to this gene are useful for the detection, treatment, and/or prevention of neurodegenerative disease states, behavioral disorders, or inflammatory conditions. Representative uses are described in the “Regeneration” and “Hyperproliferative Disorders” sections below, in Example 11, 15, and 18, and elsewhere herein. Briefly, the uses include, but are not limited to the detection, treatment, and/or prevention of Alzheimer's Disease, Parkinson's Disease, Huntington's Disease, Tourette Syndrome, meningitis, encephalitis, demyelinating diseases, peripheral neuropathies, neoplasia, trauma, congenital malformations, spinal cord injuries, ischemia and infarction, aneurysms, hemorrhages, schizophrenia, mania, dementia, paranoia, obsessive compulsive disorder, depression, panic disorder, learning disabilities, ALS, psychoses, autism, and altered behaviors, including disorders in feeding, sleep patterns, balance, and perception. In addition, elevated expression of this gene product in regions of the brain indicates that it plays a role in normal neural function.

[0046] Potentially, this gene product is involved in synapse formation, neurotransmission, learning, cognition, homeostasis, or neuronal differentiation or survival. In addition, the protein may show utility in the creation of novel therapeutics which depend upon the localizing benefits (cell and tissue specificity) of glycoproteins. This protein may also be used to produce physiologically active saccharide chains and varients, and for improvement of saccharide chains bound to physiologically active proteins. Expression within fetal tissue and other cellular sources marked by proliferating cells indicates that this protein may play a role in the regulation of cellular division, and may show utility in the diagnosis and treatment of cancer and other proliferative disorders. Similarly, developmental tissues rely on decisions involving cell differentiation and/or apoptosis in pattern formation. Thus this protein may also be involved in apoptosis or tissue differentiation and could again be useful in cancer therapy. Furthermore, the protein may also be used to determine biological activity, to raise antibodies, as tissue markers, to isolate cognate ligands or receptors, to identify agents that modulate their interactions, in addition to its use as a nutritional supplement. Protein, as well as, antibodies directed against the protein may show utility as a tumor marker and/or immunotherapy targets for the above listed tissues.

[0047] Many polynucleotide sequences, such as EST sequences, are publicly available and accessible through sequence databases. Some of these sequences are related to SEQ ID NO:13 and may have been publicly available prior to conception of the present invention. Preferably, such related polynucleotides are specifically excluded from the scope of the present invention. To list every related sequence is cumbersome. Accordingly, preferably excluded from the present invention are one or more polynucleotides comprising a nucleotide sequence described by the general formula of a−b, where a is any integer between 1 to 1257 of SEQ ID NO:13, b is an integer of 15 to 1271, where both a and b correspond to the positions of nucleotide residues shown in SEQ ID NO:13, and where b is greater than or equal to a+14.

[0048] Features of Protein Encoded by Gene No: 4

[0049] The translation product of this gene shares sequence homology with the smaller hepatocellular oncoprotein which is thought to be important in protein synthesis leading to cellular transformation.

[0050] Preferred polypeptides of the invention comprise the following amino acid sequence: VHTKEIFRERSAGFPVK (SEQ ID NO:268), LEMGFQPT KEINARGSEPCQAQSTSLPKLPRWGSRPEAPQTPQGGLESRCCTPVSKQSLNL KADRFKALTLGRAQWLT PVIQALSELRWVDHLRSGV (SEQ ID NO:269), FQPT KEINARGSEPCQAQSTSLPK (SEQ ID NO:270), PKLPRWGSRPEAPQTPQGGLESRCCTP (SEQ ID NO:271), and/or RFKALTLGRAQWLT PVIQALSELRWVD (SEQ ID NO:272). Polynucleotides encoding these polypeptides are also provided.

[0051] In another embodiment, polypeptides comprising the amino acid sequence of the open reading frame upstream of the predicted signal peptide are contemplated by the present invention. Specifically, polypeptides of the invention comprise the following amino acid sequence: VHTKEIFRERSAGFPVKMSASSLHRLPVLMALFPFQAAAAGSLGLQPPPTPMKGKPSIMLPPQYKRREG LKKKKKKIQKVALVSFGRADSIVGDGLPTNQGDKCQRERTMPGSKHISPQTPQVGKQARGSTNPSGRPG VQMLYSSI (SEQ ID NO:273). Polynucleotides encoding these polypeptides are also provided.

[0052] This gene is expressed primarily in human gall bladder.

[0053] Therefore, polynucleotides and polypeptides of the invention are useful as reagents for differential identification of the tissue(s) or cell type(s) present in a biological sample and for diagnosis of diseases and conditions which include, but are not limited to, metabolic and urogenital diseases and/or disorders, particularly proliferative conditions, such as bladder tumors. Similarly, polypeptides and antibodies directed to these polypeptides are useful in providing immunological probes for differential identification of the tissue(s) or cell type(s). For a number of disorders of the above tissues or cells, particularly of the bladder, expression of this gene at significantly higher or lower levels is routinely detected in certain tissues or cell types (e.g., urogenital, bladder, and cancerous and wounded tissues) or bodily fluids (e.g., serum, plasma, urine, synovial fluid and spinal fluid) or another tissue or cell sample taken from an individual having such a disorder, relative to the standard gene expression level, i.e., the expression level in healthy tissue or bodily fluid from an individual not having the disorder.

[0054] Preferred polypeptides of the present invention comprise immunogenic epitopes shown in SEQ ID NO: 138 as residues: Pro-30 to Lys-38, Pro-45 to Ile-60, Leu-79 to Ser-96, His-98 to Gly-118. Polynucleotides encoding said polypeptides are also provided.

[0055] The tissue distribution in bladder tumors indicates polynucleotides and polypeptides corresponding to this gene are useful for the diagnosis of carcinomas and preneoplastic or pathological conditions of bladder, or of the urogenitavrenal system. The secreted protein can also be used to determine biological activity, to raise antibodies, as tissue markers, to isolate cognate ligands or receptors, to identify agents that modulate their interactions, and as nutritional supplements. It may also have a very wide range of biological activities. Representative uses are described in the “Chemotaxis” and “Binding Activity” sections below, in Examples 11, 12, 13, 14, 15, 16, 18, 19, and 20, and elsewhere herein. Briefly, the proteins may possess the following activities: cytokine, cell proliferation/differentiation modulating activity or induction of other cytokines; immunostimulating/immmunosuppressant activities (e.g. for treating human immunodeficiency virus infection, cancer, autoimmune diseases and allergy); regulation of hematopoiesis (e.g. for treating anemia or as adjunct to chemotherapy); stimulation or growth of bone, cartilage, tendons, ligaments and/or nerves (e.g. for treating wounds, stimulation of follicle stimulating hormone (for control of fertility); chemotactic and chemokinetic activities (e.g. for treating infections, tumors); hemostatic or thrombolytic activity (e.g. for treating hemophilia. cardiac infarction etc.); anti-inflammatory activity (e.g. for treating septic shock, Crohn's Disease); as antimicrobials; for treating psoriasis or other hyperproliferative diseases; for regulation of metabolism, and behavior. Also contemplated is the use of the corresponding nucleic acid in gene therapy procedures. Protein, as well as, antibodies directed against the protein may show utility as a tumor marker and/or immunotherapy targets for the above listed tissues.

[0056] Many polynucleotide sequences, such as EST sequences, are publicly available and accessible through sequence databases. Some of these sequences are related to SEQ ID NO:14 and may have been publicly available prior to conception of the present invention. Preferably, such related polynucleotides are specifically excluded from the scope of the present invention. To list every related sequence is cumbersome. Accordingly, preferably excluded from the present invention are one or more polynucleotides comprising a nucleotide sequence described by the general formula of a−b, where a is any integer between 1 to 899 of SEQ ID NO:14, b is an integer of 15 to 913, where both a and b correspond to the positions of nucleotide residues shown in SEQ ID NO:14, and where b is greater than or equal to a+14.

[0057] Features of Protein Encoded by Gene No: 5

[0058] The translation product of this gene shares sequence homology with Slit, a secreted Drosophila protein which plays a role in the development of axon pathway development in the central nervous system. The Slit protein is necessary for the normal development of the midline of the CNS, particularly the midline glial cells, and for the concommitant formation of the commisural axon pathways. The process is dependent on the level of SLIT protein expression. It appears that the SLIT protein is excreted by the midline glial cells, where it is synthesised and is eventually associated with the surfaces of axons that traverse them.

[0059] Contact of cells with supernatant expressing the product of this gene increases the permeability of THP-1 monocyte cells to calcium. Thus, it is likely that the product of this gene is involved in a signal transduction pathway that is initiated when the product of this gene binds a receptor on the surface of the monocyte cell. Thus, polynucleotides and polypeptides have uses which include. but are not limited to, activating monocyte cells. Furthermore, when tested against U937 Myeloid cell lines, supernatants removed from cells containing this gene activated the GAS assay. Thus, it is likely that this gene activates myeloid cells through the Jak-STAT signal transduction pathway. The gamma activating sequence (GAS) is a promoter element found upstream of many genes which are involved in the Jak-STAT pathway. The Jak-STAT pathway is a large, signal transduction pathway involved in the differentiation and proliferation of cells. Therefore, activation of the Jak-STAT pathway, reflected by the binding of the GAS element, can be used to indicate proteins involved in the proliferation and differentiation of cells.

[0060] This gene is expressed primarily in infant brain, and to a lesser extent in adult cerebellum and frontal cortex.

[0061] Therefore, polynucleotides and polypeptides of the invention are useful as reagents for differential identification of the tissue(s) or cell type(s) present in a biological sample and for diagnosis of diseases and conditions which include, but are not limited to, neurological disorders. Sirmilarly, polypeptides and antibodies directed to these polypeptides are useful in providing immunological probes for differential identification of the tissue(s) or cell type(s). For a number of disorders of the above tissues or cells, particularly of the nervous system, expression of this gene at significantly higher or lower levels is routinely detected in certain tissues or cell types (e.g., cancerous and wounded tissues) or bodily fluids (e.g., serum, plasma, urine, synovial fluid and spinal fluid) or another tissue or cell sample taken from an individual having such a disorder, relative to the standard gene expression level, i.e., the expression level in healthy tissue or bodily fluid from an individual not having the disorder.

[0062] Preferred polypeptides of the present invention comprise immunogenic epitopes shown in SEQ ID NO: 139 as residues: Glu-25 to Lys-33, Glu-115 to Lys-120. Polynucleotides encoding said polypeptides are also provided.

[0063] The tissue distribution primarily in brain and homology to Slit, a gene involved in axon pathway development, indicates polynucleotides and polypeptides corresponding to this gene are useful for the treatment/detection of neurodegenerative disease states and behavioural disorders such as Alzheimer's Disease, Parkinson's Disease, spinal cord injury, brain Injuries, crushed (optic) nerve, amytri-ophic lateral sclerosis, diabetes caused nerve damage, strokes, epilepsy, multiple sclerosis, paraplegia retinal degeneration, Huntington's Disease, facial nerve damage, schizophrenia, mania, dementia, paranoia, obsessive compulsive disorder and panic disorder. Protein, as well as, antibodies directed against the protein may show utility as a tumor marker and/or immunotherapy targets for the above listed tissues.

[0064] Many polynucleotide sequences, such as EST sequences, are publicly available and accessible through sequence databases. Some of these sequences are related to SEQ ID NO:15 and may have been publicly available prior to conception of the present invention. Preferably, such related polynucleotides are specifically excluded from the scope of the present invention. To list every related sequence is cumbersome. Accordingly, preferably excluded from the present invention are one or more polynucleotides comprising a nucleotide sequence described by the general formula of a−b, where a is any integer between 1 to 2660 of SEQ ID NO:15, b is an integer of 15 to 2674, where both a and b correspond to the positions of nucleotide residues shown in SEQ ID NO:15, and where b is greater than or equal to a+14.

[0065] Features of Protein Encoded by Gene No: 6

[0066] The translation product of this gene shares sequence homology with human endothelial cell multimerin, which is a secreted protein that binds to the extracellular matrix and is thought to be involved in hemostasis. Multimerin is a factor V/Va-binding protein and may function as a carrier protein for platelet factor V (J. Biol Chem Aug. 4, 1995; 270(31):18246-51, which is hereby incorporated herein by reference).

[0067] Contact of cells with supernatant expressing the product of this gene increases the permeability of THP-1 Monocyte cells to calcium. Thus, it is likely that the product of this gene is involved in a signal transduction pathway that is initiated when the product of this gene binds a receptor on the surface of the monocyte cell. Thus, polynucleotides and polypeptides have uses which include, but are not limited to, activating monocyte cells.

[0068] This gene is expressed primarily in a variety of hematopoetic cells including T-cells, dendritic cells and B-cells as well as cells and tissues of epithelial and endothelial origin including healing wounds and keratinocytes, as well as placenta.

[0069] Therefore, polynucleotides and polypeptides of the invention are useful as reagents for differential identification of the tissue(s) or cell type(s) present in a biological sample and for diagnosis of diseases and conditions which include, but are not limited to, acute internal injury, blood clotting disorders and other disorders of hemostasis. Similarly, polypeptides and antibodies directed to these polypeptides are useful in providing immunological probes for differential identification of the tissue(s) or cell type(s). For a number of disorders of the above tissues or cells, particularly of the hemostasis, expression of this gene at significantly higher or lower levels is routinely detected in certain tissues or cell types (e.g., endothelial, immune, cancerous and wounded tissues) or bodily fluids (e.g., serum, plasma, urine, synovial fluid and spinal fluid) or another tissue or cell sample taken from an individual having such a disorder, relative to the standard gene expression level, i.e., the expression level in healthy tissue or bodily fluid from an individual not having the disorder.

[0070] Preferred polypeptides of the present invention comprise irnmunogenic epitopes shown in SEQ ID NO: 140 as residues: Ala-43 to Trp-57, Ser-81 to Gly-88, Tyr-125 to Asp-134, Pro-141 to Gly-154, Val-172 to Glu-178, Lys-296 to Gly-305, Leu-307 to Arg-314, Thr-335 to His-341. Polynucleotides encoding said polypeptides are also provided.

[0071] The tissue distribution in endothelial tissues, and the homology to human endothelial cell multimerin, indicates polynucleotides and polypeptides corresponding to this gene are useful for the diagnosis and/or treatment of disorders involving the vasculature. Elevated expression of this gene product by endothelial cells indicates that it may play vital roles in the regulation of endothelial cell function; secretion; proliferation; or angiogenesis. Furthermore, the tissue distribution indicates polynucleotides and polypeptides corresponding to this gene are useful for the diagnosis and/or treatment of disorders of the placenta. Specific expression within the placenta indicates that this gene product may play a role in the proper establishment and maintenance of placental function. Alternately, this gene product is produced by the placenta and then transported to the embryo, where it may play a crucial role in the development and/or survival of the developing embryo or fetus.

[0072] Moreover, expression of this gene product in a vascular-rich tissue such as the placenta also indicates that this gene product is produced more generally in endothelial cells or within the circulation. In such instances, it may play more generalized roles in vascular function, such as in angiogenesis. It may also be produced in the vasculature and have effects on other cells within the circulation, such as hematopoietic cells, as supported by the biological activity data mentioned previously. It may serve to promote the proliferation, survival, activation, and/or differentiation of hematopoietic cells, as well as other cells throughout the body. Protein, as well as, antibodies directed against the protein may show utility as a tumor marker and/or immunotherapy targets for the above listed tissues.

[0073] Many polynucleotide sequences, such as EST sequences, are publicly available and accessible through sequence databases. Some of these sequences are related to SEQ ID NO:16 and may have been publicly available prior to conception of the present invention. Preferably, such related polynucleotides are specifically excluded from the scope of the present invention. To list every related sequence is cumbersome. Accordingly, preferably excluded from the present invention are one or more polynucleotides comprising a nucleotide sequence described by the general formula of a−b, where a is any integer between 1 to 1622 of SEQ ID NO:16, b is an integer of 15 to 1636, where both a and b correspond to the positions of nucleotide residues shown in SEQ ID NO:16, and where b is greater than or equal to a+14.

[0074] Features of Protein Encoded by Gene No: 7

[0075] Preferred polypeptides of the invention comprise the following amino acid sequence: RIPLQSDGSFLHEKSSQQRSNRNFPCPTLQCNPEVSFWFVVTDPSKNHTLPAVEVQSAIRMNKNRINNA FFLNDQTLEFLKIPSTLAPPMDPSVPIWIIIFGVIFCIIIVAIALLILSGIWQRRRKNKEPSEVDDAED KCENMITIENGIPSDPLDMKG GHINDAFMTEDERLTPL (SEQ ID NO:274), PCPTLQCNPEVSFWFVVTDPSKNHT (SEQ ID NO:275), AIRMNKNRINNAFFLNDQTLEFL (SEQ ID NO:276), IWQRRRKNKEPSEVDDAEDKCENM (SEQ ID NO:277), PLDMKGGHINDAFMTEDER (SEQ ID NO:278), GSRTTALQRGVSLSSSVMKASLICPPFMSRGSEGMPFSIVIMFSHLSSASSTSDGSLFFLLRCQIPDKI SSAIATMMMQNITPNIIIQMGTDGSMGGASVEGIFKNSRVWSFRKKALLIRFLFILMADCTSTAGRV (SEQ ID NO:279), VSLSSSVMKASLICPPFMSRGSEGMPFS (SEQ ID NO:280), and/or SMGGASVEGIFKNSRVWSFRKKAL (SEQ ID NO:281). Polynucleotides encoding these polypeptides are also provided.

[0076] A preferred fragment of the present invention comprises the following amino acid sequence: MLWLLFFLVTAIHAELCQPGAENAFKVRLSIRTALGDKAYAWDTNEEYLFKAMVAFSMRKVPNREATEI SHVLLCNVTQRYHSGLWLQTLQKITPFLLLRCNQP (SEQ ID NO:246). Polynucleotides encoding these polypeptides are also provided.

[0077] This gene is expressed primarily in kidney, and to a lesser extent, in gall bladder and testes.

[0078] Therefore, polynucleotides and polypeptides of the invention are useful as reagents for differential identification of the tissue(s) or cell type(s) present in a biological sample and for diagnosis of diseases and conditions which include, but are not limited to, diseases of the renal, urogenital, or reproductive system. Similarly, polypeptides and antibodies directed to these polypeptides are useful in providing immunological probes for differential identification of the tissue(s) or cell type(s). For a number of disorders of the above tissues or cells, particularly of the renal system, expression of this gene at significantly higher or lower levels is routinely detected in certain tissues or cell types (e.g., renal, urogenital, reproductive, and cancerous and wounded tissues) or bodily fluids (e.g., serum, plasma, urine, seminal fluid, synovial fluid and spinal fluid) or another tissue or cell sample taken from an individual having such a disorder, relative to the standard gene expression level, i.e., the expression level in healthy tissue or bodily fluid from an individual not having the disorder.

[0079] Preferred polypeptides of the present invention comprise immunogenic epitopes shown in SEQ ID NO: 141 as residues: Lys-60 to Ala-66, Arg-169 to Cys-186, Asp-199 to Gly-205, Thr-214 to Leu-219. Polynucleotides encoding said polypeptides are also provided.

[0080] The tissue distribution in kidney indicates the protein product of this gene could be used in the treatment and/or detection of kidney diseases including renal failure, nephritus, renal tubular acidosis, proteinuria, pyuria, edema, pyelonephritis, hydronephritis, nephrotic syndrome, crush syndrome, glomerulonephritis, hematuria, renal colic and kidney stones, in addition to Wilm's Tumor Disease, and congenital kidney abnormalities such as horseshoe kidney, polycystic kidney, and Falconi's syndrome. Moreover, the tissue distribution in gall bladder indicates that the protein is useful for the treatment, detection, and/or prevention of various metabolic disorders. Alternatively, the expression within testes indicates that the protein is useful in normal testicular function. Therefore, this gene product is useful in the treatment of male infertility, and/or could be used as a male contraceptive. Furthermore, the protein may also be used to determine biological activity, to raise antibodies, as tissue markers, to isolate cognate ligands or receptors, to identify agents that modulate their interactions, in addition to its use as a nutritional supplement. Protein, as well as, antibodies directed against the protein may show utility as a tumor marker and/or immunotherapy targets for the above listed tissues.

[0081] Many polynucleotide sequences, such as EST sequences, are publicly available and accessible through sequence databases. Some of these sequences are related to SEQ ID NO:17 and may have been publicly available prior to conception of the present invention. Preferably, such related polynucleotides are specifically excluded from the scope of the present invention. To list every related sequence is cumbersome. Accordingly, preferably excluded from the present invention are one or more polynucleotides comprising a nucleotide sequence described by the general formula of a−b, where a is any integer between 1 to 1418 of SEQ ID NO:17, b is an integer of 15 to 1432, where both a and b correspond to the positions of nucleotide residues shown in SEQ ID NO:17, and where b is greater than or equal to a+14.

[0082] Features of Protein Encoded by Gene No: 8

[0083] The translation product of this gene was shown to have homology to the HNK-1 sulfotransferase from Rattus norvegicus (See Genbank Accession No. gb|AAB88123.1|(AF022729); all references available through this accession are hereby incorporated herein by reference).

[0084] Preferred polypeptides of the invention comprise the following amino acid sequence:GARGSQQDAPALQEAEVRGPERAQPARGR (SEQ ID NO:282), SERPGEGPARPGQDDQGPAVPAVAGAGVGVHDPADHRVLGQRSAAHFYLHTSFSRPHTGPPLPTPGPDR TGSSRPTPMSTSFWTISHAGVKQSDLPRKETEQPPAPGEHGGERERLRLVPARRPAQPRPGPAAGGAEE RAAGLLRQLQPGLPHQGARIRRHPQLGAEPPDRGRPARGHLLLRAQGGLHQLEARDDRAERKPAAPRCA LPRPAAHPARARAQRQRAPDLQQVLAPLREALPPPHEGQAQEVHQVPLRARPLRAPDLRLPQQVRAGER GVLPQVRRAHAAGVRQPHQPARLGARGLPRWPQGVLRQLHPVPAGPAHGEAGALQRALAAGVPPLPPVP DRLRFLGKLETLDEDAAQLLQLLQVDRQSASPRATGTGPPAAGRRTGSPRSPWPGGSSCINSTRPTLFS SATPSPKTSSETESFRVAFSRVPGT (SEQ ID NO:283), RPGQDDQGPAVPAVAGAGVGVHDPA (SEQ ID NO:284), SRPHTGPPLPTPGPDRTGSSR (SEQ ID NO:285), SHAGVKQSDLPRKETEQPPAPGE (SEQ ID NO:286), RRPAQPRPGPAAGGAEERAAGLL (SEQ ID NO:287), RRHPQLGAEPPDRGRPARGHLLL (SEQ ID NO:288), RDDRAERKPAAPRCALPRPAAHPAR (SEQ ID NO:289), RAPDLQQVLAPLREALPPPHEGQAQEV (SEQ ID NO:290), DLRLPQQVRAGERGVLPQVRRAHAAG (SEQ ID NO:291), QPARLGARGLPRWPQGVLRQLHPVPAG (SEQ ID NO:292), AGVPPLPPVPDRLRFLGKLETLDE (SEQ ID NO:293), QLLQLLQVDRQSASPRATGTGPPAA (SEQ ID NO:294), NSTRPTLFSSATPSPKTSSETESFR (SEQ ID NO:295), LGGKRTAGPPGVAAAAARRPRPESPASPGIVVDLARVAEAVHLPPVLVEGRQLLRVRVQQVLDEVGEGH LEASAEGLARRGGQAGWGVHPQHGHGELAVELLVLQLELAAEGGDQAHEGVAHEEELGVLLELDLHEV AGELPVAAPELVEGQVRAGVVHVLARDAQRVAVGRTAVQQASAQHDHHALPVGAGHLGHVAVDGPVPW HDQVAQLRVGDVVECALLGGEGQAGVGAEAPQHVPPLRLLPALVWAAPGVARGPVVASHALLHAPPAQA AAPSPFWEGHSASRQHEKLSRNSSTSESAVSSLSCPARAWAAAAPCAA (SEQ ID NO:296), EAVHLPPVLVEGRQLLRVRVQQV (SEQ ID NO:297), GHLEASAEGLARRGGQAGWGVHP (SEQ ID NO:298), QLELAAEGGDQAHEGVAHEEELGVLLEL (SEQ ID NO:299), GELPVAAPELVEGQVRAGVVHVLARDA (SEQ ID NO:300), AVQQASAQHDHHALPVGAGHLGHVA (SEQ ID NO:301), ALVWAAPGVARGPVVASHALLHA (SEQ ID NO:303), HDQVAQLRVGDWECALLGGEGQAG (SEQ ID NO:302), PPAQAAAPSPFWEGHSASRQHEKLSRNS (SEQ ID NO:304), SRVTFPERRRSSRLRRGSMEESVRGYDWSPRDARRSPDQGRQQAERRNVLRGFCANSSLAFPTKERAFD DIPNSELSHLIVDDRHGAIYCYVPKVACTNWKRVMIVLSGSLLHRGAPYRDPLRIPREHVHNASAHLTF NKFWRRYGKLSRHLMKVKLKKYTKFLFVRDPFVRLISAFRSKFELENEEFYRKFAVPMLRVYANHTSLP ASAREAFRAGLKVSFANFIQYLLDPHTEKLAPFNEHWRQVYRLCHPCQIDYDSWGSWRLWTRTPRSCCS YSRWTGSPLPPELPEQDRQQLGGGLVRQD PPGLEAAAV (SEQ ID NO:305), RSPDQGRQQAERRNVLRGFCANSSLA (SEQ ID NO:306), TKERAFDDIPNSELSHLIVDDRHGAIYC (SEQ ID NO:307), FNKFWRRYGKLSRHLMKVKLKKY (SEQ ID NO:308), FVRLISAFRSKFELENEEFYRKFA (SEQ ID NO:309), TSLPASAREAFRAGLKVSFANFIQYL (SEQ ID NO:310), and/or SYSRWTGSPLPPELPEQDRQQLGGG (SEQ ID NO:311) Polynucleotides encoding these polypeptides are also provided.

[0085] The gene encoding the disclosed cDNA is believed to reside on chromosome 7. Accordingly, polynucleotides related to this invention are useful as a marker in linkage analysis for chromosome 7.

[0086] This gene is expressed primarily in PMA activated monocytic HL60 cells.

[0087] Therefore, polynucleotides and polypeptides of the invention are useful as reagents for differential identification of the tissue(s) or cell type(s) present in a biological sample and for diagnosis of diseases and conditions which include, but are not limited to, blood related disease such as leukemia. Similarly, polypeptides and antibodies directed to these polypeptides are useful in providing immunological probes for differential identification of the tissue(s) or cell type(s). For a number of disorders of the above tissues or cells, particularly of the immune system, expression of this gene at significantly higher or lower levels is routinely detected in certain tissues or cell types (e.g., immune, hematopoietic, and cancerous and wounded tissues) or bodily fluids (e.g., serum, plasma, urine, synovial fluid and spinal fluid) or another tissue or cell sample taken from an individual having such a disorder, relative to the standard gene expression level, i.e., the expression level in healthy tissue or bodily fluid from an individual not having the disorder.

[0088] Preferred polypeptides of the present invention comprise immunogenic epitopes shown in SEQ ID NO: 142 as residues: Ala-29 to Thr-37, Pro-39 to Leu-63. Polynucleotides encoding said polypeptides are also provided.

[0089] The tissue distribution in HL60 cells, combined with the homology to the HNK-1 sulfotransferase protein, indicates polynucleotides and polypeptides corresponding to this gene are useful for the diagnosis, treatment, and/or prevention of blood related diseases such as leukemia. Moreover, polynucleotides and polypeptides corresponding to this gene are useful for the treatment and diagnosis of hematopoictic related disorders such as anemia, pancytopenia, leukopenia, thrombocytopenia or leukemia since stromal cells are important in the production of cells of hematopoietic lineages. Representative uses are described in the “Immune Activity” and “Infectiou's Disease” sections below, in Example 11, 13, 14, 16, 18, 19, 20, and 27. and elsewhere herein. Briefly, the uses include bone marrow cell ex-vivo culture, bone marrow transplantation, bone marrow reconstitution, radiotherapy or chemotherapy of neoplasia.

[0090] The gene product may also be involved in lymphopoiesis, therefore, it can be used in immune disorders such as infection, inflammation, allergy, immunodeficiency etc. In addition, this gene product may have commercial utility in the expansion of stem cells and committed progenitors of various blood lineages, and in the differentiation and/or proliferation of various cell types. Furthermore, the protein may also be used to determine biological activity, to raise antibodies, as tissue markers, to isolate cognate ligands or receptors, to identify agents that modulate their interactions, in addition to its use as a nutritional supplement. Protein, as well as, antibodies directed against the protein may show utility as a tumor marker and/or immunotherapy targets for the above listed tissues.

[0091] Many polynucleotide sequences, such as EST sequences, are publicly available and accessible through sequence databases. Some of these sequences are related to SEQ ID NO:18 and may have been publicly available prior to conception of the present invention. Preferably, such related polynucleotides are specifically excluded from the scope of the present invention. To list every related sequence is cumbersome. Accordingly, preferably excluded from the present invention are one or more polynucleotides comprising a nucleotide sequence described by the general formula of a−b, where a is any integer between 1 to 1533 of SEQ ID NO:18, b is an integer of 15 to 1547, where both a and b correspond to the positions of nucleotide residues shown in SEQ ID NO:18, and where b is greater than or equal to a+14.

[0092] Features of Protein Encoded by Gene No: 9

[0093] When tested against fibroblast cell lines, supernatants removed from cells containing this gene activated the EGR1 (early growth response gene 1) promoter element. Thus, it is likely that this gene activates fibroblasts, or more generally, other cells or cell types, through the EGR1 signal transduction pathway. EGR1 is a separate signal transduction pathway from Jak-STAT, genes containing the EGR1 promoter are induced in various tissues and cell types upon activation, leading the cells to undergo differentiation and proliferation.

[0094] The gene encoding the disclosed cDNA is believed to reside on chromosome 12. Accordingly, polynucleotides related to this invention are useful as a marker in linkage analysis for chromosome 12.

[0095] Preferred polypeptides of the invention comprise the following amino acid sequence: STGCSE (SEQ ID NO:312), CLCLGCGLPELHSYLDPGPYLLVYPTLFWLCPSAVSPWAYTCYQLGLGPQWGAAALSFTVDAAIRVWDV STETCVPLPWFRGGGVTNCSGPQTAAKSWLPLLQLSFESGRPRCGLVRGGLLYQGAVRLAAGAQMAADC CSLYWESH (SEQ ID NO:313), YPTLFWLCPSAVSPWAYTCYQLGLGP (SEQ ID NO:314), DVSTETCYPLPWFRGGGVTNCSGPQ (SEQ ID NO:315), LLYQGAVRLAAGAQMAADCCSL (SEQ ID NO:316), NKRKTYLFLEVGMWGVGQNRWWPWERVPRGRGWGCLSKEGQVMNRASTPSRGFLGPPKHWAKTWKLGID KVQRDVGNSACGPAHTEQGPFVEGRWKVMSWGWAPGSPWIMPQGRSSNTGLFRVRKRRMTGLPSCTLGF PFISTARRSPLGSQTME (SEQ ID NO:317), GVGQNRWWPWERVPRGRGWGCLSKEG (SEQ ID NO:318), AKTWKLGIDKVQRDVGNSACGPAHTE (SEQ ID NO:319), and/or WAPGSPWIMPQGRSSNTGLFRVRKRRMTGLPSCTLGFPFIST (SEQ ID NO:320). Polynucleotides encoding these polypeptides are also provided.

[0096] This gene is expressed primarily in fetal tissues such as fetal brain, fetal liver, fetal kidney, and to a lesser extent, in T cells and macrophages.

[0097] Therefore, polynucleotides and polypeptides of the invention are useful as reagents for differential identification of the tissue(s) or cell type(s) present in a biological sample and for diagnosis of diseases and conditions which include, but are not limited to, blood-related, immuno-related, neural-related, or developmental disorders. Similarly, polypeptides and antibodies directed to these polypeptides are useful in providing immunological probes for differential identification of the tissue(s) or cell type(s). For a number of disorders of the above tissues or cells, particularly of the hematopoesis and immune system, expression of this gene at significantly higher or lower levels is routinely detected in certain tissues or cell types (e.g., neural, immune, hematopoietic, urogenital, renal, hepatic, metabolic, developmental, and cancerous and wounded tissues) or bodily fluids (e.g., serum, plasma, amniotic fluid, bile, urine, synovial fluid and spinal fluid) or another tissue or cell sample taken from an individual having such a disorder, relative to the standard gene expression level, i.e., the expression level in healthy tissue or bodily fluid from an individual not having the disorder.

[0098] Preferred polypeptides of the present invention comprise immunogenic epitopes shown in SEQ ID NO: 143 as residues: Cys-126 to Thr-138, Glu-165 to Gly-172, Thr-189 to Leu-200, Gly-222 to Gly-229, Pro-346. to Lys-354. Polynucleotides encoding said polypeptides are also provided.

[0099] The tissue distribution in fetal liver indicates polynucleotides and polypeptides corresponding to this gene are useful for the diagnosis, treatment, and/or prevention of blood related diseases, particularly immune or hematopoietic disorders. Representative uses are described in the “Regeneration”, “Infectiou's Diseases”, and “Hyperproliferative Disorders” sections below, in Example 11, 15, and 18, and elsewhere herein. Briefly, the uses the detection/treatment of neurodegenerative disease states, behavioral disorders, or inflammatory conditions which include, but are not limited to Alzheimer's Disease, Parkinson's Disease, Huntington's Disease, Tourette Syndrome, meningitis, encephalitis, demyelinating diseases, peripheral neuropathies, neoplasia, trauma, congenital malformations, spinal cord injuries, ischemia and infarction, aneurysms, hemorrhages, schizophrenia, mania, dementia, paranoia, obsessive compulsive disorder, depression, panic disorder, learning disabilities, ALS, psychoses, autism, and altered behaviors, including disorders in feeding, sleep patterns, balance, and perception. In addition, elevated expression of this gene product in regions of the brain indicates that it plays a role in normal neural function.

[0100] Potentially, this gene product is involved in synapse formation, neurotransmission, learning, cognition, homeostasis, or neuronal differentiation or survival. Alternatively, the expression within fetal kidney indicates the protein product of this gene could be used in the treatment and/or detection of kidney diseases including renal failure, nephritus, renal tubular acidosis, proteinuria, pyuria, edema, pyelonephritis, hydronephritis, nephrotic syndrome, crush syndrome, glomerulonephritis, hematuria, renal colic and kidney stones, in addition to Wilm's Tumor Disease, and congenital kidney abnormalities such as horseshoe kidney, polycystic kidney, and Falconi's syndrome.

[0101] Moreover, the expression within various fetal tissues, combined with the detected EGR1 biological activity, indicates that this protein may play a role in the regulation of cellular division, and may show utility in the diagnosis and treatment of cancer and other proliferative disorders. Similarly, developmental tissues rely on decisions involving cell differentiation and/or apoptosis in pattern formation. Thus this protein may also be involved in apoptosis or tissue differentiation and could again be useful in cancer therapy. Furthermore, the protein may also be used to determine biological activity, to raise antibodies, as tissue markers, to isolate cognate ligands or receptors, to identify agents that modulate their interactions, in addition to its use as a nutritional supplement. Protein, as well as, antibodies directed against the protein may show utility as a tumor marker and/or immunotherapy targets for the above listed tissues.

[0102] Many polynucleotide sequences, such as EST sequences, are publicly available and accessible through sequence databases. Some of these sequences are related to SEQ ID NO:19 and may have been publicly available prior to conception of the present invention. Preferably, such related polynucleotides are specifically excluded from the scope of the present invention. To list every related sequence is cumbersome. Accordingly, preferably excluded from the present invention are one or more polynucleotides comprising a nucleotide sequence described by the general formula of a−b, where a is any integer between 1 to 1324 of SEQ ID NO:19, b is an integer of 15 to 1338, where both a and b correspond to the positions of nucleotide residues shown in SEQ ID NO:19, and where b is greater than or equal to a+14.

[0103] Features of Protein Encoded by Gene No: 10

[0104] Preferred polypeptides of the invention comprise the following amino acid sequence: SSYQCPKVTFFKSSVDT (SEQ ID NO:321). Polynucleotides encoding these polypeptides are also provided.

[0105] The gene encoding the disclosed cDNA is believed to reside on chromosome 15. Accordingly, polynucleotides related to this invention are useful as a marker in linkage analysis for chromosome 15.

[0106] This gene is expressed primarily in glioblastoma, liver, fetal lung, and amygdala.

[0107] Therefore, polynucleotides and polypeptides of the invention are useful as reagents for differential identification of the tissue(s) or cell type(s) present in a biological sample and for diagnosis of diseases and conditions which include, but are not limited to, neural, metabolic, or developmental disorders, particularly mental or neurodegenerative conditions. Similarly, polypeptides and antibodies directed to these polypeptides are useful in providing immunological probes for differential identification of the tissue(s) or cell type(s). For a number of disorders of the above tissues or cells, particularly of the the central nervous system, expression of this gene at significantly higher or lower levels is routinely detected in certain tissues or cell types (e.g., neural, metabolic, developmental, pulmonary, hepatic, and cancerous and wounded tissues) or bodily fluids (e.g., serum, plasma, amniotic fluid, pulmonary surfactant or sputum, bile, urine, synovial fluid and spinal fluid) or another tissue or cell sample taken from an individual having such a disorder, relative to the standard gene expression level, i.e., the expression level in healthy tissue or bodily fluid from an individual not having the disorder.

[0108] Preferred polypeptides of the present invention comprise immunogenic epitopes shown in SEQ ID NO: 144 as residues: Pro-31 to Ala-37, Lys-62 to Asn-72. Polynucleotides encoding said polypeptides are also provided.

[0109] The tissue distribution in glioblastoma and amygdala indicates polynucleotides and polypeptides corresponding to this gene are useful for the diagnosis, treatment, and/or prevention of central nervous system disorders. Representative uses are described in the “Regeneration” and “-Hyperproliferative Disorders” sections below, in Example 11, 15, and 18, and elsewhere herein. Briefly, polynucleotides and polypeptides corresponding to this gene are useful for the detection/treatment of neurodegenerative disease states, behavioral disorders, or inflammatory conditions which include, but are not limited to Alzheimer's Disease, Parkinson's Disease, Huntington's Disease, Tourette Syndrome, meningitis, encephalitis, demyelinating diseases, peripheral neuropathies, neoplasia, trauma, congenital malformations, spinal cord injuries, ischemia and infarction, aneurysms, hemorrhages, schizophrenia, mania, dementia; paranoia, obsessive compulsive disorder, depression, panic disorder, learning disabilities, ALS, psychoses, autism, and altered behaviors, including disorders in feeding, sleep patterns, balance, and perception. In addition, elevated expression of this gene product in regions of the brain indicates that it plays a role in normal neural function.

[0110] Potentially, this gene product is involved in synapse formation, neurotransmission, learning, cognition, homeostasis, or neuronal differentiation or survival.

[0111] The protein may also be useful in the treatment, detection, and/or prevention of liver disorders, which include, but are not limited to hepatoblastoma, jaundice, hepatitis, liver metabolic diseases and conditions that are attributable to the differentiation of hepatocyte progenitor cells. In addition the expression in fetus would suggest a useful role for the protein product in developmental abnormalities, fetal deficiencies, pre-natal disorders and various would-healing models and/or tissue trauma. Furthermore, the protein may also be used to determine biological activity, to raise antibodies, as tissue markers, to isolate cognate ligands or receptors, to identify agents that modulate their interactions, in addition to its use as a nutritional supplement. Protein, as well as, antibodies directed against the protein may show utility as a tumor marker and/or immunotherapy targets for the above listed tissues.

[0112] Many polynucleotide sequences, such as EST sequences, are publicly available and accessible through sequence databases. Some of these sequences are related to SEQ ID NO:20 and may have been publicly available prior to conception of the present invention. Preferably, such related polynucleotides are specifically excluded from the scope of the present invention. To list every related sequence is cumbersome. Accordingly, preferably excluded from the present invention are one or more polynucleotides comprising a nucleotide sequence described by the general formula of a−b, where a is any integer between 1 to 2057 of SEQ ID NO:20, b is an integer of 15 to 2071, where both a and b correspond to the positions of nucleotide residues shown in SEQ ID NO:20, and where b is greater than or equal to a+14.

[0113] Features of Protein Encoded by Gene No: 11

[0114] Preferred polypeptides of the invention comprise the following amino acid sequence: HYXSTPGRVPVRQFAAASTSGGPWVPGGXLEAPFQVAPSLSHSTPVFPGLI (SEQ ID NO:322). Polynucleotides encoding these polypeptides are also provided.

[0115] This gene is expressed primarily in osteoblasts.

[0116] Therefore, polynucleotides and polypeptides of the invention are useful as reagents for differential identification of the tissue(s) or cell type(s) present in a biological sample and for diagnosis of diseases and conditions which include, but are not limited to, degenerative conditions of the bone including arthritis and osteoporosis. Similarly, polypeptides and antibodies directed to these polypeptides are useful in providing immunological probes for differential identification of the tissue(s) or cell type(s). For a number of disorders of the above tissues or cells, particularly of the skeletal system, expression of this gene at significantly higher or lower levels is routinely detected in certain tissues or cell types (e.g., skeletal, cancerous and wounded tissues) or bodily fluids (e.g., serum, plasma, urine, synovial fluid and spinal fluid) or another tissue or cell sample taken from an individual having such a disorder, relative to the standard gene expression level, i.e., the expression level in healthy tissue or bodily fluid from an individual not having the disorder.

[0117] Preferred polypeptides of the present invention comprise immunogenic epitopes shown in SEQ ID NO: 145 as residues: Thr-45 to Cys-50, Met-55 to Pro-60. Polynucleotides encoding said polypeptides are also provided.

[0118] The tissue distribution in osteoblasts indicates polynucleotides and polypeptides corresponding to this gene are useful for treating degenerative conditions of the bone mediated by alterations in the activity ratio of osteoblasts and osteoclasts. Furthermore, elevated levels of expression of this gene product in osteoblastoma indicates that it may play a role in the survival, proliferation, and/or growth of osteoblasts. Therefore, it is useful in influencing bone mass in such conditions as osteoporosis. Protein, as well as, antibodies directed against the protein may show utility as a tumor marker and/or immunotherapy targets for the above listed tissues.

[0119] Many polynucleotide sequences, such as EST sequences, are publicly available and accessible through sequence databases. Some of these sequences are related to SEQ ID NO:21 and may have been publicly available prior to conception of the present invention. Preferably, such related polynucleotides are specifically excluded from the scope of the present invention. To list every related sequence is cumbersome. Accordingly, preferably excluded from the present invention are one or more polynucleotides comprising a nucleotide sequence described by the general formula of a−b, where a is any integer between 1 to 1625 of SEQ ID NO:21, b is an integer of 15 to 1639, where both a and b correspond to the positions of nucleotide residues shown in SEQ ID NO:21, and where b is greater than or equal to a+14.

[0120] Features of Protein Encoded by Gene No: 12

[0121] The gene encoding the disclosed cDNA is thought to reside on chromosome 17. Accordingly, polynucleotides related to this invention are useful as a marker in linkage analysis for chromosome 17.

[0122] Preferred polypeptides of the invention comprise the following amino acid sequence: ARGKYESAQPGGTQPEPGLGAR (SEQ ID NO:323). Polynucleotides encoding these polypeptides are also provided.

[0123] This gene is expressed primarily in pituitary, cerebellum and kidney and to a lesser extent in a range of fetal tissues including lung, heart and spleen.

[0124] Therefore, polynucleotides and polypeptides of the invention are useful as reagents for differential identification of the tissue(s) or cell type(s) present in a biological sample and for diagnosis of diseases and conditions which include, but are not limited to, metabolic, neurological, and renal disorders. Similarly, polypeptides and antibodies directed to these polypeptides are useful in providing immunological probes for differential identification of the tissue(s) or cell type(s). For a number of disorders of the above tissues or cells, particularly of the endocrine, renal and nervous systems expression of this gene at significantly higher or lower levels is routinely detected in certain tissues or cell types (e.g., kidney, fetal, brain, cancerous and wounded tissues) or bodily fluids (e.g., serum, plasma, urine, synovial fluid and spinal fluid) or another tissue or cell sample taken from an individual having such a disorder, relative to the standard gene expression level, i.e., the expression level in healthy tissue or bodily fluid from an individual not having the disorder.

[0125] Preferred polypeptides of the present invention comprise imrnmunogenic epitopes shown in SEQ ID NO: 146 as residues: Pro-29 to Gly-34, Gln-79 to Arg-84, Arg-146 to Arg-152, Ser-183 to Ser-193, Gly-233 to His-241, Tyr-265 to Pro-278, Thr-304 to Arg-320, Leu-328 to Gly-333, Glu-385 to Arg-399. Polynucleotides encoding said polypeptides are also provided.

[0126] The high expression of this secreted gene in the pituitary indicates a role for this gene or gene product in the treatment/detection of metabolic disorders associated with the endocrine system, such as growth and developmental defects. Expression in the cerebellum indicates a role in the treatment/detection of neurodegenerative disease states and behavioural disorders such as Alzheimer's Disease, Parkinson's Disease, Huntington's Disease, schizophrenia, mania, dementia, paranoia, obsessive compulsive disorder and panic disorder. Expression in the kidney indicates a role in the treatment/detection of renal disorders such as kidney failure, Wilms Tumor and kidney stones, as well as nephritus, renal tubular acidosis, proteinuria, pyuria, edema, pyelonephritis, hydronephritis, nephrotic syndrome, crush syndrome, glomerulonephritis, hematuria, renal colic and congenital kidney abnormalities such as horseshoe kidney, polycystic kidney, and Falconi's syndrome. Protein, as well as, antibodies directed against the protein may show utility as a tumor marker and/or immunotherapy targets for the above listed tissues.

[0127] Many polynucleotide sequences, such as EST sequences, are publicly available and accessible through sequence databases. Some of these sequences are related to SEQ ID NO:22 and may have been publicly available prior to conception of the present invention. Preferably, such related polynucleotides are specifically excluded from the scope of the present invention. To list every related sequence is cumbersome. Accordingly, preferably excluded from the present invention are one or more polynucleotides comprising a nucleotide sequence described by the general formula of a−b, where a is any integer between 1 to 1846 of SEQ ID NO:22, b is an integer of 15 to 1860, where both a and b correspond to the positions of nucleotide residues shown in SEQ ID NO:22, and where b is greater than or equal to a+14.

[0128] Features of Protein Encoded by Gene No: 13

[0129] Preferred polypeptides of the invention comprise the following amino acid sequence: YIYSYLGFFNQINK (SEQ ID NO:324). Polynucleotides encoding these polypeptides are also provided.

[0130] This gene is expressed in only T-cell helper II cells.

[0131] Therefore, polynucleotides and polypeptides of the invention are useful as reagents for differential identification of the tissue(s) or cell type(s) present in a biological sample and for diagnosis of diseases and conditions which include, but are not limited to, immune or hematopoietic disorders, particularly infectiou's Diseases, inflammatory, or immunodefiency conditions. Similarly, polypeptides and antibodies directed to these polypeptides are useful in providing immunological probes for differential identification of the tissue(s) or cell type(s). For a number of disorders of the above tissues or cells, particularly of the immune system, expression of this gene at significantly higher or lower levels is routinely detected in certain tissues or cell types (e.g., immune, hematopoietic, and cancerous and wounded tissues) or bodily fluids (e.g., serum, plasma, urine, synovial fluid and spinal fluid) or another tissue or cell sample taken from an individual having such a disorder, relative to the standard gene expression level, i.e., the expression level in healthy tissue or bodily fluid from an individual not having the disorder.

[0132] Preferred polypeptides of the present invention comprise immunogenic epitopes shown in SEQ ID NO: 147 as residues: Pro-44 to Tyr-49. Polynucleotides encoding said polypeptides are also provided.

[0133] The tissue distribution in T-helper cells indicates polynucleotides and polypeptides corresponding to this gene are useful for the treatment of infectiou's Diseases. Representative uses are described in the “Immune Activity” and “Infectiou's Disease” sections below, in Example 11, 13, 14, 16, 18, 19, 20, and 27, and elsewhere herein. Briefly, the expression of this gene product indicates a role in regulating the proliferation; survival; differentiation; and/or activation of hematopoietic cell lineages, including blood stem cells. This gene product is involved in the regulation of cytokine production, antigen presentation, or other processes that may also suggest a usefulness in the treatment of cancer (e.g. by boosting immune responses).

[0134] Since the gene is expressed in cells of lymphoid origin, the natural gene product is involved in immune functions. Therefore it is also used as an agent for immunological disorders including arthritis, asthma, immunodeficiency diseases such as AIDS, leukemia, rheumatoid arthritis, granulomatou's Disease, inflammatory bowel disease, sepsis, acne, neutropenia, neutrophilia, psoriasis, hypersensitivities, such as T-cell mediated cytotoxicity; immune reactions to transplanted organs and tissues, such as host-versus-graft and graft-versus-host diseases, or autoimmunity disorders, such as autoimmune infertility, lense tissue injury, demyelination, systemic lupus erythematosis, drug induced hemolytic anemia, rheumatoid arthritis, Sjogren's Disease, scleroderma and tissues. In addition, this gene product may have commercial utility in the expansion of stem cells and committed progenitors of various blood lineages, and in the differentiation and/or proliferation of various cell types. Furthermore, the protein may also be used to determine biological activity, to raise antibodies, as tissue markers, to isolate cognate ligands or receptors, to identify agents that modulate their interactions, in addition to its use as a nutritional supplement. Protein, as well as, antibodies directed against the protein may show utility as a tumor marker and/or immunotherapy targets for the above listed tissues.

[0135] Many polynucleotide sequences, such as EST sequences, are publicly available and accessible through sequence databases. Some of these sequences are related to SEQ ID NO:23 and may have been publicly available prior to conception of the present invention. Preferably, such related polynucleotides are specifically excluded from the scope of the present invention. To list every related sequence is cumbersome. Accordingly, preferably excluded from the present invention are one or more polynucleotides comprising a nucleotide sequence described by the general formula of a−b, where a is any integer between 1 to 1885 of SEQ ID NO:23, b is an integer of 15 to 1899, where both a and b correspond to the positions of nucleotide residues shown in SEQ ID NO:23, and where b is greater than or equal to a+14.

[0136] Features of Protein Encoded by Gene No: 14

[0137] Preferred polypeptides of the invention comprise the following amino acid sequence: ASTLAQTTGTCKXXXSSRRARSRTQRXFQLRPDKRSAPSLLQFIQAQEELSKENTGRQLAAREAVLALE GSTQLTGPVTQVAASKTHCSGMALTASPVPVLGAAPAKXPTQNXPGQXGRAXXKVXTSWXXVATKVLHG LEVSTHLGKRKLSGRSWLPGPALHATPSQSHTQTGSQIVHPPQGEVREVGRGRGQPPAQPVHAHPSQQH PSPAHLAGLSLWTGTA (SEQ ID NO:325), AMLETWRPGPSXGELATNSGQRASQDSQHSPPHVR AHLLISPLPAFPSMGGPAGRSAPXXLTETKSELQRLRRRQARASXSXPAGEPGAGHSDSFNCVPTNGQP LRSCSLSKLRRSFLKRTQGDSWLPEKQSWLWKAPPS (SEQ ID NO:326), SHQSHLINPASSAKGSWAQLKAQPPAHVLGGTGQEGPPPTADQPESPGWDPSSFTNGSSGPRALPTSVH PTLQQGAPCRRNWAPCRGLVETRMLRRQLPHGTSKRDLGWASLQRGSPQETPQ (SEQ ID NO:327), RPDKRSAPSLLQFIQAQEELSKENTGRQLAAREAV (SEQ ID NO:328), ATPSQSHTQTGSQIVHPPQGEVREVGRGRGQPP (SEQ ID NO:329), QDSQHSPPHVRAHLLISPLPAFPSMGGPA (SEQ ID NO:330), DSFNCVPTNGQPLRSCSLSKLRRSFLKR (SEQ ID NO:331), KGSWAQLKAQPPAHVLGGTGQEGPP (SEQ ID NO:332), KPSHQP (SEQ ID NO:334), STREPWLGSVFLHQRELRPQGPAHLCAPHTAAGSTLQEELGTLQGSGGDEDATEAAAPWDQ (SEQ ID NO:335), and/or APSLLQFIQAQEELSKENTGRQLAAR (SEQ ID NO:333). Polynucleotides encoding these polypeptides are also provided.

[0138] This gene is expressed exclusively in adult human testis.

[0139] Therefore, polynucleotides and polypeptides of the invention are useful as reagents for differential identification of the tissue(s) or cell type(s) present in a biological sample and for diagnosis of diseases and conditions which include, but are not limited to, reproductive disorders, particularly abnormalities of the testis, in addition to impotence and infertility. Similarly, polypeptides and antibodies directed to these polypeptides are useful in providing immunological probes for differential identification of the tissue(s) or cell type(s). For a number of disorders of the above tissues or cells, particularly of the male reproductive system, expression of this gene at significantly higher or lower levels is routinely detected in certain tissues or cell types (e.g., reproductive, testicular, adrogen regulated, and cancerous and wounded tissues) or bodily fluids (e.g., lymph, serum, plasma, seminal fluid, urine, synovial fluid and spinal fluid) or another tissue or cell sample taken from an individual having such a disorder, relative to the standard gene expression level, i.e., the expression level in healthy tissue or bodily fluid from an individual not having the disorder.

[0140] Preferred polypeptides of the present invention comprise immunogenic epitopes shown in SEQ ID NO: 148 as residues: His-45 to Gly-56, Trp-62 to Tyr-68, His-94 to Trp-100. Polynucleotides encoding said polypeptides are also provided.

[0141] The tissue distribution in testis indicates polynucleotides and polypeptides corresponding to this gene are useful for the diagnosis, treatment, and/or prevention of abnormalities of the reproductive system. In addition, expression of this gene product in the testis may implicate this gene product in normal testicular function. This gene product is useful in the treatment of male infertility, and/or could be used as a male contraceptive. Moreover, the protein product of this gene is useful in the treatment, detection, and/or prevention of a variety of disorders related to androgen-regulated tissues, particularly the prostate gland. Furthermore, the protein may also be used to determine biological activity, to raise antibodies, as tissue markers, to isolate cognate ligands or receptors, to identify agents that modulate their interactions, in addition to its use as a nutritional supplement. Protein, as well as, antibodies directed against the protein may show utility as a tumor marker and/or immunotherapy targets for the above listed tissues.

[0142] Many polynucleotide sequences, such as EST sequences, are publicly available and accessible through sequence databases. Some of these sequences are related to SEQ ID NO:24 and may have been publicly available prior to conception of the present invention. Preferably, such related polynucleotides are specifically excluded from the scope of the present invention. To list every related sequence is cumbersome. Accordingly, preferably excluded from the present invention are one or more polynucleotides comprising a nucleotide sequence described by the general formula of a−b, where a is any integer between 1 to 1437 of SEQ ID NO:24, b is an integer of 15 to 1451, where both a and b correspond to the positions of nucleotide residues shown in SEQ ID NO:24, and where b is greater than or equal to a+14.

[0143] Features of Protein Encoded by Gene No: 15

[0144] The translation product of this gene shares sequence homology with the human VAKTI precursor (See e.g., Genbank Accession No. gnl|PID|e1311078 (AJ228139)), in addition to the ovoinhibitor and thrombin inhibitors, which are thought to be important in inhibition of protease activities. Included in this invention as preferred domains are Kazal serine protease inhibitors family domains, which were identified using the ProSite analysis tool. The Kazal inhibitor family is one of the numerous families of serine proteinase inhibitors. The basic structure of such a type of inhibitor is shown in the following schematic representation:

[chemical structure]

[0145] ‘C’: conserved cysteine involved in a disulfide bond.

[0146] ‘#’: active site residue.

[0147] ‘*’: position of the pattern.

[0148] Seven Kazal-type serine inhibitor domains were identified in the amino acid sequence referenced in Table 1 for this gene. These domains comprise the following amino acid sequence: CPDYYEAVCGTDGKTYDNRCALC (SEQ ID NO:356), CSAFRPFVRDGRLGCTRENDPVLGPDGKTHGNKCAMC (SEQ ID NO:357), CKEXEKQVRNGRLFCTRESDPVRGPDGRMHGNKCALC (SEQ ID NO:358), CSQYQNQAKNGILFCTRENDPIRGPDGKMHGNLCSMC (SEQ ID NO:359), CSEYRKLVRNGKLACTRENNPIQGPDGKVHGNTCSMC (SEQ ID NO:360), CSEXRKSRKNGRLFCXRENDPIQGPDGKMHGNTCSMC (SEQ ID NO:361), and/or CSEFRDQVRNGTLICTREHNPVRGPDGKMHGNKCAMC (SEQ ID NO:362). Polynucleotides encoding these polypeptides are also provided.

[0149] Further preferred are polypeptides comprising the Kazal-type inhibitor domains of the amino acid sequence referenced in Table I for this gene, and at least 5, 10, 15, 20, 25, 30, 50, or 75 additional contiguous amino acid residues of the amino acid sequence referenced in Table 1 for this gene. The additional contiguous amino acid residues is N-terminal or C-terminal to the Kazal-type inhibitor domain. Alternatively, the additional contiguous amino acid residues is both N-terminal and C-terminal to the Kazal-type inhibitor domain, wherein the total N- and C-terminal contiguous amino acid residues equal the specified number. The above preferred polypeptide domains are characteristic of a signature specific to Kazal serine protease inhibitor proteins.

[0150] Contact of cells with supernatant expressing the product of this gene has been shown to increase the permeability of the plasma membrane of monocytes to calcium. Thus, it is likely that the product of this gene is involved in a signal transduction pathway that is initiated when the product binds a receptor on the surface of the plasma membrane of both immunce cells, in addition to other cell-lines or tissue cell types. Thus, polynucleotides and polypeptides have uses which include, but are not limited to, activating monocytes. Binding of a ligand to a receptor is known to alter intracellular levels of small molecules, such as calcium, potassium and sodium, as well as alter pH and membrane potential. Alterations in small molecule concentration can be measured to identify supernatants which bind to receptors of a particular cell.

[0151] Moreover, when tested against NIH3T3 and U937 cell lines, supernatants removed from cells containing this gene activated the EGR1 (early growth response) and GAS (gamma activating sequence) promoter elements. Thus, it is likely that this gene activates fibroblasts or hematopoietic cells through the EGR1 and/or JAK-STAT signal transduction pathway. EGR1 is a separate signal transduction pathway from Jak-STAT, genes containing the EGR1 promoter are induced in various tissues and cell types upon activation, leading the cells to undergo differentiation and proliferation. GAS is also a promoter element found upstream of many genes which are involved in the Jak-STAT pathway. The Jak-STAT pathway is a large, signal transduction pathway involved in the differentiation and proliferation of cells. Therefore, activation of the Jak-STAT pathway, reflected by the binding of the GAS element, can be used to indicate proteins involved in the proliferation and differentiation of cells.

[0152] Preferred polypeptides of the invention comprise the following amino acid sequence: CSYRPQFPVDPRVRATCIVFN (SEQ ID NO:336), GTENLLAPERTILSRAQMGKCMATPAPCVRSSSKQKKKKRKRRKVXQETKDNLRVQLPLXSCVVNXANP GKTDGFFAPERMTPSRAQMEKCMATPAPCVRPSFNKKKEQEQRLKEKLQRKSAVNFGTK (SEQ ID NO:337), LLAPERTILSRAQMGKCMAT PAPCVR (SEQ ID NO:338), PGKTDGFFAPERMTPSRAQMEKCM (SEQ ID NO:339), EQRLKEKLQRKSAVNFG (SEQ ID NO:340), KTLLENFSTQGTFVAMHPAVRATDWITLPCTKKPSISHLFFXFLAKILFSISSNSSFTLSLGIFSFFXX QLSTHCTLIAMRLPIRTKNRIIFPCASKSSISNKGPKSTAYILLWITALTFPFTFYTNLGPGFRILSTQ CTSVVICFPICATNSFIIIRTDKIPISFSFFKIITIQLCWGSSLGSSC (SEQ ID NO:341), MHPAVRATDWITLPCTKKPSIS (SEQ ID NO:342), LIA MRLPIRTKNRIIFP (SEQ ID NO:343), SSISKGPKSTAYILLWITALTFPFT (SEQ ID NO:344), IIIRTDKIPISFSFFKIITIQLC (SEQ ID NO:345), NDGQCLAYNTTHYRERAMTSHARVSLGPSRDPLERPPFFFFFFFFFFFKFEHTGTHGTLVSMHFAIWAT DRIMLPGAYKCSIPHLVPKFTADFLCSFSFSLCSCSFFLLKEGLTHGAGVAMHFSIWALDGVILSGAKK PSVFPGFAXFTTQLXKGSCTLRLSFVS (SEQ ID NO:346), CLAYNTTHYRERAMTSHARVSL (SEQ ID NO:347), GTLVSMHFAIWATDRIMLPGAYKCSIPHLVP (SEQ ID NO:348), GVILSGAKKPSVFPGFAXFTTQLX (SEQ ID NO:349), KKASHM EQVLPCIFPSGPWMGSFSLXQKSRPFFLDLRXSLHNSXKEAVLLDCLLFLXXPSFFFFSSSSAWKKTSH M EQVLPCTFPSGPWIGLFSLVQASFPFLTSFRYSLQSSAYEVAFPDSLLFLARASAFFFSSFSAWK (SEQ ID NO:350), CIFPSGPWMGSFSLXQKSRPFFLDLRXS (SEQ ID NO:351), WIGLFSLVQASFPFLTSFRYSLQSSAYE (SEQ ID NO:352), NSAVNIKIRQRMEYFSVPEKMTLFWQMGKCMATCVPCVKPTSKQKMKKRKRLKHELETKENLEKQPHM QSFAVNIESL (SEQ ID NO:353), IKIRQRMEYFSVPEKMTLFVVQM (SEQ ID NO:354), and/or VKPTSKQKMKKRKRLKHELETKENL (SEQ ID NO:355). Polynucleotides encoding these polypeptides are also provided.

[0153] The gene encoding the disclosed cDNA is believed to reside on chromosome 5. Accordingly, polynucleotides related to this invention are useful as a marker in linkage analysis for chromosome 5.

[0154] This gene is expressed primarily in heart, tonsils, Hodgkin's lymphoma, neuroblastoma, leukocyte and lung.

[0155] Therefore, polynucleotides and polypeptides of the invention are useful as reagents for differential identification of the tissue(s) or cell type(s) present in a biological sample and for diagnosis of diseases and conditions which include, but are not limited to, cardiovascular, immune, or hemodynamic disorders. Similarly, polypeptides and antibodies directed to these polypeptides are useful in providing immunological probes for differential identification of the tissue(s) or cell type(s). For a number of disorders of the above tissues or cells, particularly of the circulatory system, expression of this gene at significantly higher or lower levels is routinely detected in certain tissues or cell types (e.g., cardiovascular, muscle, immune, hematopotetic pulmonary, and cancerous and wounded tissues) or bodily fluids (e.g., lymph, pulmonary surfacLant or sputum, serum, plasma, uLtine, synovial fluid and spinal fluid) or another tissue or cell sample taken from an individual having such a disorder, relative to the standard gene expression level, i.e., the expression level in healthy tissue or bodily fluid from an individual not having the disorder.

[0156] Preferred polypeptides of the present invention comprise immunogenic epitopes shown in SEQ ID NO: 149 as residues: Ala-20 to Gln-27. Polynucleotides encoding said polypeptides are also provided.

[0157] The tissue distribution in heart and immune cells and tissues, the homology to protease inhibitors, in addition to the detected calcium flux, EGR1, and GAS biological activities indicates polynucleotides and polypeptides corresponding to this gene are useful for disgnosis and treatment of hemodynamic or vascular disorders, including hemorrhage, heart failure, and embolism, because proteases and their inhibitors are often involved in the cascades controlling hemadynamic controls. Protein may also show utility in the treatment, detection, and/or prevention of a variety of metabolic (i.e. cellular or physiological) and/or proliferative disorders in which aberrant regulation of a protease is thought to be involved, particularly in the premature activation of zymogens, for example.

[0158] The secreted protein can also be used to determine biological activity, to raise antibodies, as tissue markers, to isolate cognate ligands or receptors, to identify agents that modulate their interactions and as nutritional supplements. It may also have a very wide range of biological activities. Typical of these are cytokine, cell proliferation/differentiation modulating activity or induction of other cytokines; immunostimulating/immunosuppressant activities (e.g. for treating human immunodeficiency virus infection, cancer, autoimmune diseases and allergy); regulation of hematopoiesis (e.g. for treating anemia or as adjunct to chemotherapy); stimulation or growth of bone, cartilage, tendons, ligaments and/or nerves (e.g. for treating wounds, stimulation of follicle stimulating hormone (for control of fertility); chemotactic and chemokinetic activities (e.g. for treating infections, tumors); hemostatic or thrombolytic activity (e.g. for treating hemophilia, cardiac infarction etc.); anti-inflammatory activity (e.g. for treating septic shock, Crohn's Disease); as antimicrobials; for treating psoriasis or other hyperproliferative diseases; for iegulation of metabolism, and behavior. Also contemplated is the use of the corresponding nucleic acid in gene therapy procedures. Protein, as well as, antibodies directed against the protein may show utility as a tumor marker and/or immunotherapy targets for the above listed tissues. Protein, as well as, antibodies directed against the protein may show utility as a tumor marker and/or immunotherapy targets for the above listed tissues.

[0159] Many polynucleotide sequences, such as EST sequences, are publicly available and accessible through sequence databases. Some of these sequences are related to SEQ ID NO:25 and may have been publicly available prior to conception of the present invention. Preferably, such related polynucleotides are specifically excluded from the scope of the present invention. To list every related sequence is cumbersome. Accordingly, preferably excluded from the present invention are one or more polynucleotides comprising a nucleotide sequence described by the general formula of a−b, where a is any integer between 1 to 2303 of SEQ ID NO:25, b is an integer of 15 to 2317, where both a and b correspond to the positions of nucleotide residues shown in SEQ ID NO:25, and where b is greater than or equal to a+14.

[0160] Features of Protein Encoded by Gene No: 16

[0161] The translation product of this gene shares sequence homology with the ecotropic retrovirus receptor and the human cationic amino acid transporter-3 (See, e.g., Genbank Accession Nos. pir|A53035|A53035 and gi|4378940|emb|CAA04263.1| (AJ000730); all references available through these accessions are hereby incorporated by reference herein) which are thought to be important in viral infections and amino acid and polyamine transport. Based on the sequence similarity, the translation product of this gene is expected to share at least some biological activities with cationic amino acid transporter proteins. Such activities are known in the art, some of which are described elsewhere herein. Transmembrane domains as predicted using PSORT, comprise or consist of residues 4 to 20, 40 to 56, 68 to 84, 154 to 170, 183 to 199, 217 to 233, and/or 243 to 259, of the amino acid sequence referenced in Table 1 for this gene.

[0162] Preferred polypeptides of the invention comprise the following amino acid sequence: PRVRGTVVRLRQHRPSAYILVSTVLTLMVPWHSLDPDSALADAFYQRGYRWAGFIVAAGSICA (SEQ ID NO:363), TVVRLRQHRPSAYILVSTVLTLMVP (SEQ ID NO:364), WHSLDPDSALADAFYQRGYRWAGFIV (SEQ ID NO:365), TPSCSASSSPCHALSMPWPPMGSSSRCLPMCTPGHRCLWRAPWRSGSSRPSWHCCWTWSRWFSSCPLAH SWPTHSWPPVSLCCASRSLPRPAPQAQPALAP (SEQ ID NO:366), LSMPWPPMGSSSRCLPMCTPGHRC (SEQ ID NO:367), APWRSGSSRPSWHCCWTWSRWFSSCPL (SEQ ID NO:368), THSWPPVSLCCASRSLPRPAPQ (SEQ ID NO:369), AYILVSTVLTLMVPWHSLDPDSALADAFYQRGYRWAGFIVAAGSICAMNTVLLSLLFSLP (SEQ ID NO:370), PWHSLDPDSALADAFYQRGYRWAGFIVAAGS (SEQ ID NO:371), RIVYAMAADGLFFQVFAHVHPRTQVPV (SEQ ID NO:372), DLESLVQFLSLGTLLA (SEQ ID NO:373), YTFVATSIIVLRFQK (SEQ ID NO:374), LTKQQSSFSDHLQLVGTVHASVPEPGELKPA (SEQ ID NO:375), LRPYLGFLDGYSPGAVVTWALGVMLASAITIGCVLVFGNSTLHLPHWGYI (SEQ ID NO:376), PGAVVTWALGVMLASAITIGCVLVFGN (SEQ ID NO:377), GAHQQQYREDLFQIPMVPLIPALSIVLNICLMLKLSYLTWVRFSIWLLMGLAV (SEQ ID NO:378), MVPLIPALSIVLNICLMLKLSYLTWV (SEQ ID NO:379), and/or YFGYGIRHSKENQRELPGLNSTHYVVFPR (SEQ ID NO:380). Polynucleotides encoding these polypeptides are also provided.

[0163] In another embodiment, polypeptides comprising the amino acid sequence of the open reading frame upstream of the predicted signal peptide are contemplated by the present invention. Specifically, polypeptides of the invention comprise the following amino acid sequence: PRVRGTVVRLRQHRPSAYILVSTVLTLMVPWHSLDPDSALADAFYQRGYRWAGFIVAAGSICAMNTVLL SLLFSLPRIVYAMAADGLFFQVFAHVHPRTQVPVAGTLAFGLLTAFLALLLDLESLVQFLSLGTLLAYT FVATSIIVLRFQKSSPPSSPGPASPGPLTKQQSSFSDHLQLVGTVHASVPEPGELKPALRPYLGFLDGY SPGAVVTWALGVMLASAITIGCVLVFGNSTLHLPHWGYILLLLLTSVMFLLSLLVLGAHQQQYREDLFQ IPMVPLIPALSIVLNICLMLKLSYLTWVRFSIWLLMGLAVYFGYGIRHSKENQRELPGLNSTHYVVFPR GSLEETVQAMQPPSQAPAQDPGHME (SEQ ID NO:381). Polynucleotides encoding these polypeptides are also provided.

[0164] This gene is expressed primarily in placenta and brain tissue.

[0165] Therefore, polynucteotides and polypeptides of the invention are useful as reagents for differential identification of the tissue(s) or cell type(s) present in a biological sample and for diagnosis of diseases and conditions which include, but are not limited to, reproductive, neural, or metabolic disorders, in addition to viral infections. Similarly, polypeptides and antibodies directed to these polypeptides are useful in providing immunological probes for differential identification of the tissue(s) or cell type(s). For a number of disorders of the above tissues or cells, particularly of the central nervous system and placenta, expression of this gene at significantly higher or lower levels is routinely detected in certain tissues or cell types (e.g., reproductive, neural, hepatic, metabolic, and cancerous and wounded tissues) or bodily fluids (e.g., lymph, serum, plasma, bile, amniotic fluid, urine, synovial fluid and spinal fluid) or another tissue or cell sample taken from an individual having such a disorder, relative to the standard gene expression level, i.e., the expression level in healthy tissue or bodily fluid from an individual not having the disorder.

[0166] Preferred polypeptides of the present invention comprise immunogenic epitopes shown in SEQ ID NO: 150 as residues: Gln-87 to Ser-99, Pro-102 to Phe-110, Gln-204 to Leu-211, Ser-262 to Glu-268, Pro-294 to His-305. Polynucleotides encoding said polypeptides are also provided.

[0167] The tissue distribution in placenta, combined with the homology to a retroviral receptor and cationic amino acid transporters, indicates polynucleotides and polypeptides corresponding to this gene are useful for the diagnosis and intervention of viral infections, or diseases and malfunctions related to amino acid transport. Specifically, soluble forms of this protein or, polynucleotides of the present invention, can be used to bind to retroviruses so as to prevent their entry and infection of susceptible cells. They can be used for therapy/prevention of HIV infection and certain forms of leukemia. Polynucleotide or polypeptides of the present invention can be used to identify susceptibility to retroviral infection. Based upon the tissue distribution in the brain, polynucleotides and polypeptides corresponding to this gene are useful for the detection, treatment, and/or prevention of neurodegenerative disease states, behavioral disorders, or inflammatory conditions. Representative uses are described in the “Regeneration” and “Hyperproliferative Disorders” sections below, in Example 11, 15, and 18, and elsewhere herein. Briefly, the uses include, but are not limited to the detection, treatment, and/or prevention of Alzheimer's Disease, Parkinson's Disease, Huntington's Disease, Tourette Syndrome, meningitis, encephalitis, demyelinating diseases, peripheral neuropathies, neoplasia, trauma, congenital malformations, spinal cord injuries, ischemia and infarction, aneurysms, hemorrhages, schizophrenia, mania, dementia, paranoia, obsessive compulsive disorder, depression, panic disorder, learning disabilities, ALS, psychoses, autism, and altered behaviors, including disorders in feeding, sleep patterns, balance, and perception. In addition, elevated expression of this gene product in regions of the brain indicates that it plays a role in normal neural function.

[0168] Potentially, this gene product is involved in synapse formation, neurotransmission, learning, cognition, homeostasis, or neuronal differentiation or survival.

[0169] Additionally, the tissue distribution in the placenta indicates that this gene is useful for the diagnosis and/or treatment of disorders of the placenta, including but not limited to those involving cationic amino acid transporter protein function. Specific expression within the placenta indicates that this gene product may play a role in the proper establishment and maintenance of placental function. Alternately, this gene product is produced by the placenta and then transported to the embryo, where it may play a crucial role in the development and/or survival of the developing embryo or fetus.

[0170] Expression of this gene product in a vascular-rich tissue such as the placenta also indicates that this gene product is produced more generally in endothelial cells or within the circulation. In such instances; it may play more generalized roles in vascular function, such as in angiogenesis. It may also be produced in the vasculature and have effects on other cells within the circulation, such as hematopoietic cells. It may serve to promote the proliferation, survival, activation, and/or differentiation of hematopoietic cells, as well as other cells throughout the body. Furthermore, the protein may also be used to determine biological activity, to raise antibodies, as tissue markers, to isolate cognate ligands or receptors, to identify agents that modulate their interactions, in addition to its use as a nutritional supplement. Protein, as well as, antibodies directed against the protein may show utility as a tumor marker and/or immunotherapy targets for the above listed tissues.

[0171] Many polynucleotide sequences, such as EST sequences, are publicly available and accessible through sequence databases. Some of these sequences are related to SEQ ID NO:26 and may have been publicly available prior to conception of the present invention. Preferably, such related polynucleotides are specifically excluded from the scope of the present invention. To list every related sequence is cumbersome. Accordingly, preferably excluded from the present invention are one or more polynucleotides comprising a nucleotide sequence described by the general formula of a−b, where a is any integer between 1 to 1458 of SEQ ID NO:26, b is an integer of 15 to 1472, where both a and b correspond to the positions of nucleotide residues shown in SEQ ID NO:26, and where b is greater than or equal to a+14.

[0172] Features of Protein Encoded by Gene No: 17

[0173] The translation product of this gene has been shown to have homology to the human nuclear factor IV (See Genbank Accession No. gi|35038), which is thought to play a role as a type 2 DNA helicase in DNA metabolism either during transcription, DNA repair, and/or during the cell-cycle. Moreover, the protein may play a role in chromosomal translocations.

[0174] Preferred polypeptides of the invention comprise the following amino acid sequence:ARDLIL (SEQ ID NO:382), LTFYLQFLAPKDKPSGDTAAVFEEGGDVDDLVSTFNMHLVFCD (SEQ ID NO:383), and/or FLAPKDKPSGDTAAVFEEGGDVDDL (SEQ ID NO:384). Polynucleotides encoding these polypeptides are also provided.

[0175] The gene encoding the disclosed cDNA is believed to reside on chromosome 2. Accordingly, polynucleotides related to this invention are useful as a marker in linkage analysis for chromosome 2.

[0176] This gene is expressed primarily in activate T-cells, and to a lesser extent, in B-cells and monocytes.

[0177] Therefore, polynucleotides and polypeptides of the invention are useful as reagents for differential identification of the tissue(s) or cell type(s) present in a biological sample and for diagnosis of diseases and conditions which include, but are not limited to, immune or hematopoietic disorders, particularly leukemia, Grave's Disease, rheumatoid arthritis and other autoimmune diseases. Similarly, polypeptides and antibodies directed to these polypeptides are useful in providing immunological probes for differential identification of the tissue(s) or cell type(s). For a number of disorders of the above tissues or cells, particularly of the immune system, expression of this gene at significantly higher or lower levels is routinely detected in certain tissues or cell types (e.g., immune, hematopoietic cancerous and wounded tissues) or bodily fluids (e.g., serum, plasma, urine, synovial fluid and spinal fluid) or another tissue or cell sample taken from an individual having such a disorder, relative to the standard gene expression level, i.e., the expression level in healthy tissue or bodily fluid from an individual not having the disorder.

[0178] Preferred polypeptides of the present invention comprise immunogenic epitopes shown in SEQ ID NO: 151 as residues: Gly-27 to Cys-35. Polynucleotides encoding said polypeptides are also provided.

[0179] The tissue distribution in T-cells, B-cells, and monocytes indicates polynucleotides and polypeptides corresponding to this gene are useful for the treatment or diagnosis of immune system diseases. Representative uses are described in the “Immune Activity” and “Infectiou's Disease” sections below, in Example 11, 13, 14, 16, 18, 19, 20, and 27, and elsewhere herein. Briefly, the expression of this gene product indicates a role in regulating the proliferation; survival; differentiation; and/or activation of hematopoietic cell lineages, including blood stem cells. This gene product is involved in the regulation of cytokine production, antigen presentation, or other processes that may also suggest a usefulness in the treatment of cancer (e.g. by boosting immune responses).

[0180] Since the gene is expressed in cells of lymphoid origin, the natural gene product is involved in immune functions. Therefore it is also used as an agent for immunological disorders including arthritis, asthma, immunodeficiency diseases such as AIDS, leukemia, rheumatoid arthritis, granulomatou's Disease, inflammatory bowel disease, sepsis, acne, neutropenia, neutrophilia, psoriasis, hypersensitivities, such as T-cell mediated cytotoxicity; immune reactions to transplanted organs and tissues, such as host-versus-graft and graft-versus-host diseases, or autoimmunity disorders, such as autoimmune infertility, lense tissue injury, demyelination, systemic lupus erythematosis, drug induced hemolytic anemia, rheumatoid arthritis, Sjogren's Disease, scleroderma and tissues. In addition, this gene product may have commercial utility in the expansion of stem cells and committed progenitors of various blood lineages, and in the differentiation and/or proliferation of various cell types. Furthermore, the protein may also be used to determine biological activity, raise antibodies, as tissue markers, to isolate cognate ligands or receptors, to identify agents that modulate their interactions, in addition to its use as a nutritional supplement. Protein, as well as, antibodies directed against the protein may show utility as a tumor marker and/or immunotherapy targets for the above listed tissues.

[0181] Many polynucleotide sequences; such as EST sequences, are publicly available and accessible through sequence databases. Some of these sequences are related to SEQ ID NO:27 and may have been publicly available prior to conception of the present invention. Preferably, such related polynucleotides are specifically excluded from the scope of the present invention. To list every related sequence is cumbersome. Accordingly, preferably excluded from the present invention are one or more polynucleotides comprising a nucleotide sequence described by the general formula of a−b, where a is any integer between 1 to 1529 of SEQ ID NO:27, b is an integer of 15 to 1543, where both a and b correspond to the positions of nucleotide residues shown in SEQ ID NO:27, and where b is greater than or equal to a+14.

[0182] Features of Protein Encoded by Gene No: 18

[0183] Preferred polypeptides of the invention comprise the following amino acid sequence: HASAHASAHASGCGA (SEQ ID NO:385), QGVGVADEGGLERQRVDAGARLGHMGQPVAFSTRQLHLALPAPGTAGVTVPHPHAREGWGDLPLVPDA EDPTVGVPAEGLLVLGHVVERAELILVRGLHQAEALARESEEMHGSRHG (SEQ ID NO:386), EGGLERQRVDAGARLGHMGQPVAFS (SEQ ID NO:387), LALPAPGTAGVTVPHPHAREGVVGDLPLV (SEQ ID NO:388), PAEGLLVLGHVVERAELILVRGLHQAEA (SEQ ID NO:389), HLFKFFYTIAFMQWFTEFMELFLSVWELIKTXNLCFVCFSEHKPGQLVPAGPTSQLLCRALGRVHLCSP TTRSQTPTQSWVTPQLLWRLGSGRLVAQVLQVGSFCGPRVGDAVLGEQTFQP FDLL (SEQ ID NO:390), AFMQWFTEFMELFLSVWELIKTXNLCFVC (SEQ ID NO:391), and/or RSQTPTQSWVTPQLLWRLGSGRLVAQ (SEQ ID NO:392). Polynucleotides encoding these polypeptides are also provided.

[0184] The gene encoding the disclosed cDNA is believed to reside on chromosome 16. Accordingly, polynucleotides related to this invention are useful as a marker in linkage analysis for chromosome 16.

[0185] This gene is expressed primarily in human infant brain, and to a lesser extent, in adult brain and lung.

[0186] Therefore, polynucleotides and polypeptides of the invention are useful as reagents for differential identification of the tissue(s) or cell type(s) present in a biological sample and for diagnosis of diseases and conditions which include, but are not limited to, neural, developmental, or pulmonary disorders. Similarly, polypeptides and antibodies directed to these polypeptides are useful in providing immunological probes for differential identification of the tissue(s) or cell type(s). For a number of disorders of the above tissues or cells, particularly of the central nervous system (CNS), expression of this gene at significantly higher or lower levels is routinely detected in certain tissues or cell types (e.g., neural, developmental, pulmonary, and cancerous and wounded tissues) or bodily fluids (e.g., lymph, serum, plasma, urine, amniotic fluid, synovial fluid and spinal fluid) or another tissue or cell sample taken from an individual having such a disorder, relative to the standard gene expression level, i.e., the expression level in healthy tissue or bodily fluid from an individual not having the disorder.

[0187] Preferred polypeptides of the present invention comprise immunogenic epitopes shown in SEQ ID NO: 152 as residues: Ser-47 to Pro-57, Ser-77 to Glu-82, Thr-90 to Trp-98, Arg-124 to Lys-137, Ala-183 to Glu-192, Lys-220 to Gln-229, Asn-244 to Arg-258, Thr-271 to Asn-278, Glu-285 to Gly-297. Polynucleotides encoding said polypeptides are also provided.

[0188] The tissue distribution in infant and adult brain indicates polynucleotides and polypeptides corresponding to this gene are useful for the diagnosis, treatment, and/or prevention of diseases of the CNS, such as mental retardation, schizophrenia, Alzheimer's Disease, paranoia, depression, and mania. Moreover, polynucleotides and polypeptides corresponding to this gene are useful for the detection, treatment, and/or prevention of neurodegenerative disease states, behavioral disorders, or inflammatory conditions. Representative uses are described in the “Regeneration” and “Hyperproliferative Disorders” sections below, in Example 11, 15, and 18, and elsewhere herein. Briefly, the uses include, but are not limited to the detection, treatment, and/or prevention of Parkinson's Disease. Huntinaton's Disease, Tourette's Syndrome, meningitis, encephalitis, demyelinating diseases, peripheral neuropathies, neoplasia, trauma, congenital malformations, spinal cord injuries, ischemia and infarction, aneurysms, hemorrhages, schizophrenia, dementia, obsessive compulsive disorder, panic disorder, learning disabilities, ALS, psychoses, autism, and altered behaviors, including disorders in feeding, sleep patterns, balance, and perception. In addition, elevated expression of this gene product in regions of the brain indicates that it plays a role in normal neural function.

[0189] Potentially, this gene product is involved in synapse formation, neurotransmission, learning, cognition, homeostasis, or neuronal differentiation or survival. The protein product of this gene may also show utility in the detection, treatment, and/or prevention of a variety of pulmonary disorders, particularly those related to disorders of the mucosal or endothelial tissues.

[0190] The expression within fetal tissue indicates that this protein may play a role in the regulation of cellular division, and may show utility in the diagnosis and treatment of cancer and other proliferative disorders. Similarly, developmental tissues rely on decisions involving cell differentiation and/or apoptosis in pattern formation. Thus this protein may also be involved in apoptosis or tissue differentiation and could again be useful in cancer therapy. Furthermore, the protein may also be used to determine biological activity, to raise antibodies, as tissue markers, to isolate cognate ligands or receptors, to identify agents that modulate their interactions, in addition to its use as a nutritional supplement. Protein, as well as, antibodies directed against the protein may show utility as a tumor marker and/or immunotherapy targets for the above listed tissues.

[0191] Many polynucleotide sequences, such as EST sequences, are publicly available and accessible through sequence databases. Some of these sequences are related to SEQ ID NO:28 and may have been publicly available prior to conception of the present invention. Preferably, such related polynucleotides are specifically excluded from the scope of the present invention. To list every related sequence is cumbersome. Accordingly, preferably excluded from the present invention are one or more polynucleotides comprising a nucleotide sequence described by the general formula of a−b, where a is any integer between 1 to 1225 of SEQ ID NO:28, b is an integer of 15 to 1239, where both a and b correspond to the positions of nucleotide residues shown in SEQ ID NO:28, and where b is greater than or equal to a+14.

[0192] Features of Protein Encoded by Gene No: 19

[0193] A preferred polypeptide fragment of the invention comprises the following amino acid sequence: MPCLEAVALILLILLVPDPPRGAAETQGEGAVGGFRSSWCEDVRYLGKNWSFVWSXLXVTAMAFVTGAL GFWAPKFLLEARVVHGLQPPCFQEPCSNPDSLIFGALTIMTGVIGVILGAEAARRYKKVIPGAEPLICA SSLLATAPCLYLALVLAPTTLLASYVFLGLGELLLSCNWAVWADILLSVVVPRCRGTAEALQITVXHIL GXLAALSHRTYL (SEQ ID NO:394).

[0194] Preferred polypeptides of the invention comprise the following amino acid sequence: GGCFLLTALYLERDETRAWQXV (SEQ ID NO:393).

[0195] In another embodiment, polypeptides comprising the amino acid sequence of the open reading frame upstream of the predicted signal peptide are contemplated by the present invention. Specifically, polypeptides of the invention comprise the following amino acid sequence: GAWGVEVVAVGSKAGCLVYQLCDLKQITFFFRASVCLSVMPCLEAVALILLILLVPDPPRGAAETQGEG AVGGFRSSWCEDVRYLGKNWSFVWSTLGVTAMAFVTGALGFWAPKFLLEARVVHGLQPPCFQEPCSNPD SLIFGALTIMTGVIGVILGAEAARRYKKVIPGAEPLICASSLLATAPCLYLALVLAPTTLLASYVFLGL GELLLSCNWAVVADILLSVVVPRCRGTAEALQITVGHILGDAGSPYLTGLISSVLRARRPDSYLQRFRS LQQSFLCCAFVIALGGGCFLLTALYLERDETRAWQPVTGTPDSNDVDSNDLERQGLLSGAGASTEEP (SEQ ID NO:395). Polynucleotides encoding these polypeptides are also provided. PSORT predicted transmembrane domains of the protein comprise the following amino acid residues: 57 to 73, 101 to 117, 150 to 166, 173 to 189, and/or 242 to 258 of the amino acid sequence referenced for this gene in Table 1.

[0196] The gene encoding the disclosed cDNA is believed to reside on chromosome 17. Accordingly, polynucleotides related to this invention are useful as a marker in linkage analysis for chromosome 17.

[0197] This gene is expressed primarily in pineal gland and thymus.

[0198] Therefore, polynucleotides and polypeptides of the invention are useful as reagents for differential identification of the tissue(s) or cell type(s) present in a biological sample and for diagnosis of diseases and conditions which include, but are not limited to, immune, endocrine, emotional or behavior disorders, in addition to autoimmune diseases. Similarly, polypeptides and antibodies directed to these polypeptides are useful in providing immunological probes for differential identification of the tissue(s) or cell type(s). For a number of disorders of the above tissues or cells, particularly of the immune system, expression of this gene at significantly higher or lower levels is routinely detected in certain tissues or cell types (e.g., immune, endocrine, hematopoietic, neural, and cancerous and wounded tissues) or bodily fluids (e.g., lymph, serum, plasma, urine, synovial fluid and spinal fluid) or another tissue or cell sample taken from an individual having such a disorder, relative to the standard gene expression level, i.e., the expression level in healthy tissue or bodily fluid from an individual not having the disorder.

[0199] Preferred polypeptides of the present invention comprise immunogenic epitopes shown in SEQ ID NO: 153 as residues: Asp-18 to Gln-27, Arg-44 to Asn-49, Pro-94 to Asp-99, Ala-225 to Ser-230, Arg-265 to Trp-271, Thr-277 to Arg-290. Polynucleotides encoding said polypeptides are also provided.

[0200] The tissue distribution in thymus indicates polynucleotides and polypeptides corresponding to this gene are useful for the diagnosis, treatment, and/or prevention of immune and autoimmune diseases, such as lupus, neutropenia, transplant rejection, and inflammatory diseases. Representative uses are described in the “Immune Activity” and “Infectiou's Disease” sections below, in Example 11, 13, 14, 16, 18, 19, 20, and 27, and elsewhere herein. Briefly, the expression of this gene product indicates a role in regulating the proliferation; survival; differentiation; and/or activation of hematopoictic cell lineages, including blood stem cells. This gene product is involved in the regulation of cytokine production, antigen presentation, or other processes suggesting a usefulness in the treatment of cancer (e.g., by boosting immune responses).

[0201] Since the gene is expressed in cells of lymphoid origin, the natural gene product is involved in immune functions. Therefore it is also used as an agent for immunological disorders including arthritis, asthma, immunodeficiency diseases such as AIDS, leukemia, rheumatoid arthritis, granulomatou's Disease, inflammatory bowel disease, sepsis, acne, neutropenia, neutrophilia, psoriasis, hypersensitivities, such as T-cell mediated cytotoxicity: immune reactions to transplanted organs and tissues, such as host-versus-graft and graft-versus-host diseases, or autoimmunity disorders, such as autoimmune infertility, lense tissue injury, demyelination, systemic lupus erythematosis, drug induced hemolytic anemia, rheumatoid arthritis, Sjogren's Disease, scleroderma and tissues. Moreover, the protein may represent a secreted factor that influences the differentiation or behavior of other blood cells, or that recruits hematopoietic cells to sites of injury. In addition, this gene product may have commercial utility in the expansion of stem cells and committed progenitors of various blood lineages, and in the differentiation and/or proliferation of various cell types. Moreover, the expression within pineal gland indicates the protein product of this gene is useful for the diagnosis, treatment, and/or prevention of disorders associated with biological clock aberrations, emotional distress, lethargy, or metabolic conditions. Furthermore, the protein may also be used to determine biological activity, to raise antibodies, as tissue markers, to isolate cognate ligands or receptors, to identify agents that modulate their interactions, in addition to its use as a nutritional supplement. Protein, as well as, antibodies directed against the protein may show utility as a tumor marker and/or immunotherapy targets for the above listed tissues.

[0202] Many polynucleotide sequences, such as EST sequences, are publicly available and accessible through sequence databases. Some of these sequences are related to SEQ ID NO:29 and may have been publicly available prior to conception of the present invention. Preferably, such related polynucleotides are specifically excluded from the scope of the present invention. To list every related sequence is cumbersome. Accordingly, preferably excluded from the present invention are one or more polynucleotides comprising a nucleotide sequence described by the general formula of a−b, where a is any integer between 1 to 1384 of SEQ ID NO:29, b,is an integer of 15 to 1398, where both a and b correspond to the positions of nucleotide residues shown in SEQ ED NO:29, and where b is greater than or equal to a+14.

[0203] Features of Protein Encoded by Gene No: 20

[0204] Preferred polypeptides of the invention comprise the following amino acid sequence:ARAGAKILFEGEF (SEQ ID NO:396), NFEIHSAFPFMLFVACLLHSSCPRTARFLASPLSESNVIFYQNQYQFPCILCFIEFARLTSFKHLIHSQ SHLVRLQYEDFSVSSEAWDTELT (SEQ ID NO:397), FPFMLFVACLLHSSCPRTARFLASPL (SEQ ID NO:398), NVIFYQNQYQFPCILCFIEFARLTSF (SEQ ID NO:399), and/or SQSHLVRLQYEDFSVSSEAWDTE (SEQ ID NO: 400). Polynucleotides encoding these polypeptides are also provided.

[0205] A preferred polypeptide fragment of the invention comprises the following amino acid sequence: MVLDFKRAGSFFLSFLWTREAFAFIFTLPLLLSLCRGKMKNSPRSDLSRLKKNVFNAFLPCLVPRFISN RGCPVYRSC (SEQ ID NO:401). Polynucleotides encoding these polypeptides are also provided.

[0206] The gene encoding the disclosed cDNA is believed to reside on chromosome 14. Accordingly, polynucleotides related to this invention are useful as a marker in linkage analysis for chromosome 14.

[0207] This gene is expressed primarily in fetal tissues such as fetal liver, fetal brain, fetal lung and fetal spleen.

[0208] Therefore, polynucleotides and polypeptides of the invention are useful as reagents for differential identification of the tissue(s) or cell type(s) present in a biological sample and for diagnosis of diseases and conditions which include, but are not limited to, developmental diseases and/or disorders, including cancers. Similarly, polypeptides and antibodies directed to these polypeptides are useful in providing immunological probes for differential identification of the.tissue(s) or cell-type(s). For a number of disorders of the above tissues or cells, particularly of the immune system and nervous system, expression of this gene at significantly higher or lower levels is routinely detected in certain tissues or cell types (e.g., developmental, hepatic, immune, hemaopoietic, neural, pulmonary, and cancerous and wounded tissues) or bodily fluids (e.g., serum, plasma, amniotic fluid, urine, synovial fluid and spinal fluid) or another tissue or cell sample taken from an individual having such a disorder, relative to the standard gene expression level, i.e., the expression level in healthy tissue or bodily fluid from an individual not having the disorder.

[0209] Preferred polypeptides of the present invention comprise immunogenic epitopes shown in SEQ ID NO: 154 as residues: Lys-38 to Cys-43, Phe-51 to Ser-57, Glu-66 to Lys-80, Gly-87 to Pro-101, Ala-108 to Asp-115, Thr-129 to Trp-137, Pro-160 to Asp-169, Gly-183 to Arg-190, Lys-207 to His-212. Polynucleotides encoding said polypeptides are also provided.

[0210] The tissue distribution in fetal tissues indicates polynucleotides and polypeptides corresponding to this gene are useful for the diagnosis, treatment, and/or prevention of developmental disorders and cancers. Representative uses are described in the “Hyperproliferative Disorders” and “Regeneration” sections below and elsewhere herein. Briefly, developmental tissues rely on decisions involving cell differentiation and/or apoptosis in pattern formation. Dysregulation of apoptosis can result in inappropriate suppression of cell death, as occurs in the development of some cancers, or in failure to control the extent of cell death, as is believed to occur in acquired immunodeficiency and certain neurodegenerative disorders, such as spinal muscular atrophy (SMA). Because of potential roles in proliferation and differentiation, this gene product may have applications in the adult for tissue regeneration and the treatment of cancers. It may also act as a morphogen to control cell and tissue type specification. Therefore, the polynucleotides and polypeptides of the present invention are useful in treating, detecting, and/or preventing said disorders and conditions, in addition to other types of degenerative conditions. Thus this protein may modulate apoptosis or tissue differentiation and is useful in the detection, treatment, and/or prevention of degenerative or proliferative conditions and diseases.

[0211] The protein is useful in modulating the immune response to aberrant polypeptides, as may exist in proliferating and cancerous cells and tissues. The protein can also be used to gain new insight into the regulation of cellular growth and proliferation. The protein is also useful in the treatment, detection, and/or prevention of immune, hematopoietic, pulmonary, or metabolic diseases, disorders, and/or conditions. Furthermore, the protein may also be used to determine biological activity, to raise antibodies, as tissue markers, to isolate cognate ligands or receptors, to identify agents that modulate their interactions, in addition to its use as a nutritional supplement. Protein, as well as, antibodies directed against the protein may show utility as a tumor marker and/or immunotherapy targets for the above listed tissues.

[0212] Many polynucleotide sequences, such as EST sequences, are publicly available and accessible through sequence databases. Some of these sequences are related to SEQ ID NO:30 and may have been publicly available prior to conception of the present invention. Preferably, such related polynucleotides are specifically excluded from the scope of the present invention. To list every related sequence is cumbersome. Accordingly, preferably.excluded from the present invention are one or more polynucleotides comprising a nucleotide sequence described by the general formula of a−b, where a is any integer between 1 to 2521 of SEQ ID NO:30, b is an integer of 15 to 2535, where both a and b correspond to the positions of nucleotide residues shown in SEQ ID NO:30, and where b is greater than or equal to a+14.

[0213] Features of Protein Encoded by Gene No: 21

[0214] The translation product of this gene was found to have homology to a 35 kd pulmonary surfactant protein, as well as, a GABA-like receptor (See Genbank Accession Nos. P70663, and gi|540271, respectively), the latter of which is thought to be important in neuronal function.

[0215] Preferred polypeptides of the invention comprise the following amino acid sequence: QKFLCASDGD (SEQ ID NO:402), AEVPLRVRRRHGRPHGPGGRQLALGIPALRSLPGCVPRHHGCSPGYGCLHRRILCLPLILLLVYKQRQA ASNRRAQELVRMDSNIQGIENPGFEASPPAQGIPEAKVRHPLSYVAQRQPSESGRHLLSEPSTPLSPPG PG DVFFPSLDPVPDSPNFEVIXPXWGTVGCCGWVWGRCI (SEQ ID NO:403), GPGGRQLALGIPALRSLPGCVPRHHGC (SEQ ID NO:404), FEASPPAQGIPEAKVRHPLSYVAQR (SEQ ID NO:405), DMSLGMWQHQWDKMDTGPPSQAPDTGHGGETSPPWHALGSPVLPEAALLSDFLFVPQWLWGQACLPTGH RHLPQLPPTSSF SEDLSTG (SEQ ID NO:406), PPSQAPDTGHGGETSPPWHALGS (SEQ ID NO:412), PVDRSSEKLLVGGSWGRWRWPVGRQAWPQSHCGTKRKSDRRAASGKTGEPSACHGGEVSP PCPVSGAWEGGPVSILSH (SEQ ID NO:407), PVDRSSEKLLVGGSWGRWRWPV (SEQ ID NO:408), TKRKSDRRAASGKTGEPSACHGGEV (SEQ ID NO:409), MTSKFGESGTGSRDGKKTSPGPGGDRGVLGSESRCRPDSEGCRWAT (SEQ ID NO:410), and/or SPGPGGDRGVLGSESRCRPD (SEQ ID NO:411). Polynucleotides encoding these polypeptides are also provided.

[0216] This gene is expressed primarily in hematopoiesis cells such as neutrophils, eosinophils and T cells.

[0217] Therefore, polynucleotides and polypeptides of the invention are useful as reagents for differential identification of the tissue(s) or cell type(s) present in a biological sample and for diagnosis of diseases and conditions which include, but are not limited to, blood diseases and/or immune diseases. Similarly, polypeptides and antibodies directed to these polypeptides are useful in providing immunological probes for differential identification of the tissue(s) or cell type(s). For a number of disorders of the above tissues or cells, particularly of the hematopoeitic and immune systems, expression of this gene at significantly higher or lower levels is routinely detected in certain tissues or cell types (e.g., immune, hematopoietic, and cancerous and wounded tissues) or bodily fluids (e.g., serum, plasma, urine, synovial fluid and spinal fluid) or another tissue or cell sample taken from an individual having such a disorder, relative to the standard gene expression level, i.e., the expression level in healthy tissue or bodily fluid from an individual not having the disorder.

[0218] Preferred polypeptides of the present invention comprise immunogenic epitopes shown in SEQ ID NO: 155 as residues: Ser-44 to Ala-63, Pro-89 to Gly-98, Pro-129 to Trp-137. Polynucleotides encoding said polypeptides are also provided.

[0219] The tissue distribution in neutrophils, eosinophils, and T cells indicates polynucleotides and polypeptides corresponding to this gene are useful for treating and diagnosis blood related diseases. Representative uses are described in the “Immune Activity” and “Infectiou's Disease” sections below, in Example 11, 13, 14, 16, 18, 19, 20, and 27, and elsewhere herein. Briefly, polynucleotides and polypeptides corresponding to this gene are useful for the treatment and diagnosis of hematopoietic related disorders such as anemia, pancytopenia, leukopenia, thrombocytopenia or leukemia since stromal cells are important in the production of cells of hematopoietic lineages. The uses include bone marrow cell ex-vivo culture, bone marrow transplantation, bone marrow reconstitution, radiotherapy or chemotherapy of neoplasia.

[0220] The gene product may also be involved in lymphopoiesis, therefore, it can be used in immune disorders such as infection, inflammation, allergy, immunodeficiency etc. In addition, this gene product may have commercial utility in the expansion of stem cells and committed progenitors of various blood lineages, and in the differentiation and/or proliferation of various cell types. The homology to a pulmonary Surfactant protein indicates that the protein is useful in enhancing or inhibiting the efficacy of the immune response across mucosal barriers, such as within the gastrointestinal tract, the sinuses, and the lungs. Furthermore, the protein may also be used to determine biological activity, to raise antibodies, as tissue markers, to isolate cognate ligands or receptors, to identify agents that modulate their interactions, in addition to its use as a nutritional supplement. Protein, as well as, antibodies directed against the protein may show utility as a tumor marker and/or immunotherapy targets for the above listed tissues.

[0221] Many polynucleotide sequences, such as EST sequences, are publicly available and accessible through sequence databases. Some of these sequences are related to SEQ ID NO:31 and may have been publicly available prior to conception of the present invention. Preferably, such related polynucleotides are specifically excluded from the scope of the present invention. To list every related sequence is cumbersome. Accordingly, preferably excluded from the present invention are one or more polynucleotides comprising a nucleotide sequence described by the general formula of a−b, where a is any integer between 1 to 1476 of SEQ ID NO:31, b is an integer of 15 to 1490, where both a and b correspond to the positions of nucleotide residues shown in SEQ ID NO:3 1, and where b is greater than or equal to a+14.

[0222] Features of Protein Encoded by Gene No: 22

[0223] When tested against U937 cell lines, supernatants removed from cells containing this gene activated the GAS (gamma activating sequence) promoter element. Thus, it is likely that this gene activates promyeloid cells, or more generally, other cells of the immune or central neurvous system, through the JAK-STAT signal transduction pathway. GAS is a promoter element found upstream of many genes which are involved in the Jak-STAT pathway. The Jak-STAT pathway is a large, signal transduction pathway involved in the differentiation and proliferation of cells. Therefore, activation of the Jak-STAT pathway, reflected by the binding of the GAS element, can be used to indicate proteins involved in the proliferation and differentiation of cells.

[0224] The gene encoding the disclosed cDNA is believed to reside on chromosome 1. Accordingly, polynucleotides related to this invention are useful as a marker in linkage analysis for chromosome 1.

[0225] Preferred polypeptides of the invention comprise the following amino acid sequence: HEVQPSYLPSNSGLI (SEQ ID NO:413). Polynucleotides encoding these polypeptides are also provided. The polypeptide of this gene has been determined to have a transmembrane domain at about amino acid position 27-44 of the amino acid sequence referenced in Table 1 for this gene. Based upon these characteristics, it is believed that the protein product of this gene shares structural features to type II membrane proteins.

[0226] In another embodiment, polypeptides comprising the amino acid sequence of the open reading frame upstream of the predicted signal peptide are contemplated by the present invention. Specifically, polypeptides of the invention comprise the following amino acid sequence: HEVQPSYLPSNSGLIMFVLWVFKITYIYILFAKNKSLASCQMIAKVDLT FFVIMYIFIHTPNTLSDFCYFLGSTALRL (SEQ ID NO:414). Polynucleotides encoding these polypeptides are also provided.

[0227] This gene is expressed primarily in the central nervous system, adult liver, adult heart, and infant brain.

[0228] Therefore, polynucleotides and polypeptides of the invention are useful as reagents for differential identification of the tissue(s) or cell type(s) present in a biological sample and for diagnosis of diseases and conditions which include, but are not limited to, neural, cardiovascular, or metabolic conditions or disorders. Similarly, polypeptides and antibodies directed to these polypeptides are useful in providing immunological probes for differential identification of the tissue(s) or cell type(s). For a number of disorders of the above tissues or cells, particularly of the central nervous system, expression of this gene at significantly higher or lower levels is routinely detected in certain tissues or cell types (e.g., neural, cardiovascular, developmental, metabolic, and cancerous and wounded tissues) or bodily fluids (e.g., serum, plasma, urine, amniotic fluid, synovial fluid and spinal fluid) or another tissue or cell sample taken from an individual having such a disorder, relative to the standard gene expression level, i.e., the expression level in healthy tissue or bodily fluid from an individual not having the disorder.

[0229] The tissue distribution in tissues of the CNS and infant brain, combined with the detected GAS biological activity indicates polynucleotides and polypeptides corresponding to this gene are useful for the treatment, diagnosis, and/or prevention of CNS disorders. Representative uses are described in the “Regeneration” and “Hyperproliferative Disorders” sections below, in Example 11, 15, and 18, and elsewhere herein. Briefly, polynucleotides and polypeptides corresponding to this gene are useful for the detection/treatment of neurodegenerative disease states, behavioral disorders, or inflammatory conditions which include, but are not limited to Alzheimer's Disease, Parkinson's Disease, Huntington's Disease, Tourette Syndrome, meningitis, encephalitis, demyelinating diseases, peripheral neuropathies, neoplasia, trauma, congenital malformations, spinal cord injuries, ischemia and infarction, aneurysms, hemorrhages, schizophrenia, mania, dementia, paranoia, obsessive compulsive disorder, depression, panic disorder, learning disabilities, ALS, psychoses, autism, and altered behaviors, including disorders in feeding, sleep patterns, balance, and perception. In addition, elevated expression of this gene product in regions of the brain indicates that it plays a role in normal neural function.

[0230] Potentially, this gene product is involved in synapse formation, neurotransmission, learning, cognition, homeostasis, or neuronal differentiation or survival.

[0231] The expression within fetal tissue indicates that this protein may play a role in the regulation of cellular division, and may show utility in the diagnosis and treatment of cancer and other proliferative disorders. Similarly, developmental tissues rely on decisions involving cell differentiation and/or apoptosis in pattern formation. Thus this protein may also be involved in apoptosis or tissue differentiation and could again be useful in cancer therapy. Furthermore, the protein may also be used to determine biological activity, to raise antibodies, as tissue markers, to isolate cognate ligands or receptors, to identify agents that modulate their interactions, in addition to its use as a nutritional supplement. Protein, as well as, antibodies directed against the protein may show utility as a tumor marker and/or immunotherapy targets for the above listed tissues.

[0232] Many polynucleotide sequences, such as EST sequences, are publicly available and accessible through sequence databases. Some of these sequences are related to SEQ ID NO:32 and may have been publicly available prior to conception of the present invention. Preferably, such related polynucleotides are specifically excluded from the scope of the present invention. To list every related sequence is cumbersome. Accordingly, preferably excluded from the present invention are one or more polynucleotides comprising a nucleotide sequence described by the general formula of a−b, where a is any integer between 1 to 1322 of SEQ ID NO:32, b is an integer of 15 to 1336, where both a and b correspond to the positions of nucleotide residues shown in SEQ ID NO:32, and where b is greater than or equal to a+14.

[0233] Features of Protein Encoded by Gene No: 23

[0234] Preferred polypeptides of the invention comprise the following amino acid sequence: GTSFRGMISTQPGSTPLASFKILALESADGHGGCSAGNDIGPYGERDDQQVFIQKVVPSASQLFVRLSS TGQRVCSVRSVDGSPTTAFTVLECEGSPAARLSAPALPAHWPGQRQLGHVGPNHRHGRPRPGPCRWPDG ARADGTAGTL (SEQ ID NO:415), PGSTPLASFKILALESADGHGGCSAGNDI (SEQ ID NO:416), GERDDQQVFIQKVVPSASQLFVRL (SEQ ID NO:417), RSVDGSPTTAFTVLECEGSPAARLS (SEQ ID NO:418), and/or PALPAHWPGQRQLGHVGPNHRHGRPR (SEQ ID NO:419). Polynucleotides encoding these polypeptides are also provided.

[0235] In another embodiment, polypeptides comprising the amino acid sequence of the open reading frame upstream of the predicted signal peptide are contemplated by the present invention. Specifically, polypeptides of the invention comprise the following amino acid sequence: VPALSPPVAVRRLQLREELDRSSCGNVLFNGYLPPPVFPVKRRNRHSLVGPQQLGGRPAPVRRSNTMPP NLGNAGLLGRMLDEKTPPSPSGQPEEPGMVRLVCGHHNWIAVAYTQFLVCYRLKEASGWQLVFSSPRLD WPIERLALTARVHGGALGEHDKMVAAATGSEILLWALQAEGGGSEIGVFHLGVPVEALFFVGNQLIATS HTGRIGVWNAVTKHWQVQEVQPITSYDAAGSFLLLGCNNGSIYYVDVQKFPLRMKDNDLLVSELYRDPA EDGVTALSVYLTPKTSDSGNWIEIAYGTSSGGVRVIVQHPXTVGSGXQLFQTFTVHRSPVTKIMLSEKH LISVCADNNHVRTWSVTRFRGMISTQPGSTPLASFKILALESADGHGGCSAGNDIGPYGERDDQQVFIQ KVVPSASQLFVRLSSTGQRVCSVRSVDGSPTTAFTVLECEGSRRLGSRPRRYLLTGQANGSLAMWDLTT AMDGLGQAPAGGLTEQELMEQLEHCELAPPAPSAPSWGCLPSPSPRISLTSLHSASSNTSLSGHRGSPS PPQAEARRRGGGSFVERCQELVRSGPDLRRPPTPAPWPSSGLGTPLTPPKMKLNETSF (SEQ ID NO:420). Polynucleotides encoding these polypeptides are also provided. An additional polypeptide fragment of the invention comprises the following amino acid sequence: MAAAVLAMTLAPTVSGTTSKCSSRRWCPVPASSSCVSHLLGSGCAPCAPWTAHPRQPSQCWSARAPRRL GSRPRRYLLTGQANGSLAMWDLTTAMDGLGQAPAGGLTEQELMEQLEHCELAPPAPFSSLMGLSPQPLT PHLPHQPPLSLQQHLLVWPPWEPKPPAG (SEQ ID NO:421). Polynucleotides encoding these polypeptides are also provided.

[0236] This gene is expressed primarily in human fetal kidney, and to a lesser extent, in thymus and bone marrow cell line (RS4;11).

[0237] Therefore, polynucleotides and polypeptides of the invention are useful as reagents for differential identification of the tissue(s) or cell type(s) present in a biological sample and for diagnosis of diseases and conditions which include, but are not limited to, developmental, metabolic, immune or hematopoietic disorders. Similarly, polypeptides and antibodies directed to these polypeptides are useful in providing immunological probes for differential identification of the tissue(s) or cell type(s). For a number of disorders of the above tissues or cells, particularly of the immune system, expression of this gene at significantly higher or lower levels is routinely detected in certain tissues or cell types (e.g., developmental, metabolic, immune, hematopoietic, and cancerous and wounded tissues) or bodily fluids (e.g., lymph, serum, amniotic fluid, plasma, urine, synovial fluid and spinal fluid) or another tissue or cell sample taken from an individual having such a disorder, relative to the standard gene expression level, i.e., the expression level in healthy tissue or bodily fluid from an individual not having the disorder.

[0238] Preferred polypeptides of the present invention comprise immunogenic epitopes shown in SEQ ID NO: 157 as residues: Leu-15 to Gly-31, Leu-56 to Gly-61, Arg-207 to Asp-212, Pro-223 to Asn-230. Polynucleotides encoding said polypeptides are also provided.

[0239] The tissue distribution in thymus and bone marrow cell lines indicates polynucleotides and polypeptides corresponding to this gene are useful for the diagnosis, treatment, and/or prevention of immune disorders involving stem cells. Moreover, polynucleotides and polypeptides corresponding to this gene are useful for the treatment and diagnosis of hematopoietic related disorders such as anemia, pancytopenia, leukopenia, thrombocytopenia or leukemia since stromal cells are important in the production of cells of hematopoietic lineages. Representative uses are described in the “Immune Activity” and “Infectiou's Disease” sections below, in Example 11, 13, 14, 16, 18, 19, 20, and 27, and elsewhere herein. Briefly, the uses include include bone marrow cell ex-vivo culture, bone marrow transplantation, bone marrow reconstitution, radiotherapy or chemotherapy of neoplasia.

[0240] The gene product may also be involved in lymphopoiesis, therefore, it can be used in immune disorders such as infection, inflammation, allergy, immunodeficiency etc. In addition, this gene product may have commercial utility in the expansion of stem cells and committed progenitors of various blood lineages, and in the differentiation and/or proliferation of various cell types.

[0241] Alternatively, the expression within fetal kidney indicates that this gene or gene product could be used in the treatment and/or detection of kidney diseases including renal failure, nephritus, renal tubular acidosis, proteinuria, pyuria, edema, pyelonephritis, hydronephritis, nephrotic syndrome, crush syndrome, glomerulonephritis, hematuria, renal colic and kidney stones, in addition to Wilm's Tumor Disease, and congenital kidney abnormalities such as horseshoe kidney, polycystic kidney, and Falconi's syndrome. Moreover, the expression within fetal tissue indicates that this protein may play a role in the regulation of cellular division, and may show utility in the diagnosis and treatment of cancer and other proliferative disorders. Similarly, developmental tissues rely on decisions involving cell differentiation and/or apoptosis in pattern formation. Thus this protein may also be involved in apoptosis or tissue differentiation and could again be useful in cancer therapy. Furthermore, the protein may also be used to determine biological activity, to raise antibodies, as tissue markers, to isolate cognate ligands or receptors, to identify agents that modulate their interactions, in addition to its use as a nutritional supplement. Protein, as well as, antibodies directed against the protein may show utility as a tumor marker and/or immunotherapy targets for the above listed tissues.

[0242] Many polynucleotide sequences, such as EST sequences, are publicly available and accessible through sequence databases. Some of these sequences are related to SEQ ID NO:33 and may have been publicly available prior to conception of the present invention. Preferably, such related polynucleotides are specifically excluded from the scope of the present invention. To list every related sequence is cumbersome. Accordingly, preferably excluded from the present invention are one or more polynucleotides comprising a nucleotide sequence described by the general formula of a−b, where a is any integer between 1 to 2619 of SEQ ID NO:33, b is an integer of 15 to 2633, where both a and b correspond to the positions of nucleotide residues shown in SEQ ID NO:33, and where b is greater than or equal to a+14.

[0243] Features of Protein Encoded by Gene No: 24

[0244] When tested against K562 cell lines, supernatants removed from cells containing this gene activated the ISRE (interferon-sensitive responsive element) promoter element. Thus, it is likely that this gene activates leukemia cells, or more generally, immune or hematopoietic cells, through the JAK-STAT signal transduction pathway. ISRE is a a promoter element found upstream in many genes which are involved in the Jak-STAT pathway. The Jak-STAT pathway is a large, signal transduction pathway involved in the differentiation and proliferation of cells. Therefore, activation of the Jak-STAT pathway, reflected by the binding of the ISRE element, can be used to indicate proteins involved in the proliferation and differentiation of cells.

[0245] Preferred polypeptides of the invention comprise the following amino acid sequence: GLKVMEICSLTFLEATNLQSRCQQAMLPLKALRKNPFLLLPSFDGCCQSLAFPGLWLQHSNLCLNHHMT FLVYLLCVSVFKYFFPFSCTYTSHWI (SEQ ID NO:422), ICSLTFLEATNLQSRCQQAMLP (SEQ ID NO:423), and/or GLWLQHSNLCLNHHMTFLVYLLCVSV (SEQ ID NO:424). Polynucleotides encoding these polypeptides are also provided.

[0246] This gene is expressed primarily in IL-1 and LPS induced neutrophils.

[0247] Therefore, polynucleotides and polypeptides of the invention are useful as reagents for differential identification of the tissue(s) or cell type(s) present in a biological sample and for diagnosis of diseases and conditions which include, but are not limited to, immune or hematopoietic disorders, particularly inflammation. Similarly, polypeptides and antibodies directed to these polypeptides are useful in providing immunological probes for differential identification of the tissue(s) or cell type(s). For a number of disorders of the above tissues or cells, particularly of the immune system, expression of this gene at significantly higher or lower levels is routinely detected in certain tissues or cell types (e.g., immune, hematopoietic, and cancerous and wounded tissues) or bodily fluids (e.g., lymph, serum, plasma, urine, synovial fluid and spinal fluid) or another tissue or cell sample taken from an individual having such a disorder, relative to the standard gene expression level, i.e., the expression level in healthy tissue or bodily fluid from an individual not having the disorder.

[0248] Preferred polypeptides of the present invention comprise immunogenic epitopes shown in SEQ ID NO: 158 as residues: Ser-45 to His-50, His-52 to Ile-57, Lys-67 to His-81. Polynucleotides encoding said polypeptides are also provided.

[0249] The tissue distribution in neutrophils, combined with the detected ISRE biological activity indicates polynucleotides and polypeptides corresponding to this gene are useful for the diagnosis, treatment, and/or prevention of inflammatory disorders, such as psoriasis, inflammatory bowel disease, rheumatoid arthritis, and sepsis. Moreover, polynucleotides and polypeptides corresponding to this gene are useful for the treatment and diagnosis of hematopoietic related disorders such as anemia, pancytopenia, leukopenia, thrombocytopenia or leukemia since stromal cells are important in the production of cells of hematopoietic lineages. Representative uses are described in the “Immune Activity” and “Infectiou's Disease,” sections below, in Example 11, 13, 14, 16, 18, 19, 20, and 27, and elsewhere herein. Briefly, the uses include bone marrow cell ex-vivo culture, bone marrow transplantation, bone marrow reconstitution, radiotherapy or chemotherapy of neoplasia.

[0250] The gene product may also be involved in lymphopoiesis, therefore, it can be used in immune disorders such as infection, inflammation, allergy, immunodeficiency etc. In addition, this gene product may have commercial utility in the expansion of stem ceolls and committed progenitors of various blood lineages, and in the differentiation and/or proliferation of various cell types. Furthermore, the protein may also be used to determine biological activity, to raise antibodies, as tissue markers, to isolate cognate ligands or receptors, to identify agents that modulate their interactions, in addition to its use as a nutritional supplement. Protein, as well as, antibodies directed against the protein may show utility as a tumor marker and/or immunotherapy targets for the above listed tissues.

[0251] Many polynucleotide sequences, such as EST sequences, are publicly available and accessible through sequence databases. Some of these sequences are related to SEQ ID NO:34 and may have been publicly available prior to conception of the present invention. Preferably, such related polynucleotides are specifically excluded from the scope of the present invention. To list every related sequence is cumbersome. Accordingly, preferably excluded from the present invention are one or more polynucleotides comprising a nucleotide sequence described by the general formula of a−b, where a is any integer between 1 to 1520 of SEQ ID NO:34, b is an integer of 15 to 1534, where both a and b correspond to the positions of nucleotide residues shown in SEQ ID NO:34, and where b is greater than or equal to a+14.

[0252] Features of Protein Encoded by Gene No: 25

[0253] Preferred polypeptides of the invention comprise the following amino acid sequence: LRISVLCRETACNWSHHPLDSN (SEQ ID NO:425). Polynucleotides encoding these polypeptides are also provided.

[0254] The gene encoding the disclosed cDNA is believed to reside on chromosome 18. Accordingly, polynucleotides related to this invention are useful as a marker in linkage analysis for chromosome 18.

[0255] This gene is expressed in whole brain, embryos, fetal liver and fetal spleen, and melanocytes.

[0256] Therefore, polynucleotides and polypeptides of the invention are useful as reagents for identification of the tissue(s) or cell type(s) present in a biological sample and for diagnosis of diseases and conditions which include, but are not limited to, neural, immune, hematopoietic, or developmental disorders, particularly mental disorders. Similarly, polypeptides and antibodies directed to these polypeptides are useful in providing Immunological probes for differential identification of the tissue(s) or cell type(s). For a number of disorders of the above tissues or cells, particularly of the central nervous system, expression of this gene at significantly higher or lower levels is routinely detected in certain tissues or cell types (e.g., neural, immune, hematopoietic, developmental, and cancerous and wounded tissues) or bodily fluids (e.g., serum, plasma, amniotic fluid, urine, synovial fluid and spinal fluid) or another tissue or cell sample taken from an individual having such a disorder, relative to the standard gene expression level, i.e., the expression level in healthy tissue or bodily fluid from an individual not having the disorder.

[0257] Preferred-polypeptides of the present invention comprise immunogenic epitopes shown in SEQ ID NO: 159 as residues: Pro-27 to Lys-42. Polynucleotides encoding said polypeptides are also provided.

[0258] The tissue distribution in brain indicates polynucleotides and polypeptides corresponding to this gene are useful for the diagnosis, treatment, and/or prevention of mental or neurodegenerative disorders. Alternatively, the expression within fetal liver/spleen indicates polynucleotides and polypeptides corresponding to this gene are useful for the treatment and diagnosis of hematopoietic related disorders such as anemia, pancytopenia, leukopenia, thrombocytopenia or leukemia since stromal cells are important in the production of cells of hematopoietic lineages. The uses include bone marrow cell ex-vivo culture, bone marrow transplantation, bone marrow reconstitution, radiotherapy or chemotherapy of neoplasia.

[0259] The gene product may also be involved in lymphopoiesis, therefore, it can be used in immune disorders such as infection, inflammation, allergy, immunodeficiency etc. In addition, this gene product may have commercial utility in the expansion of stem cells and committed progenitors of various blood lineages, and in the differentiation and/or proliferation of various cell types. The protein may also be useful for the treatment and/or detection of metabolic disorders, which include Tay-Sach's Disease, phenylkenonuria, galactosemia, hyperlipidemias, porphyrias, and Hurler's syndrome. Protein, as well as, antibodies directed against the protein may show utility as a tumor marker and/or immunotherapy targets for the above listed tissues.

[0260] Many polynucleotide sequences, such as EST sequences, are publicly available and accessible through sequence databases. Some of these sequences are related to SEQ ID NO:35 and may have been publicly available prior to conception of the present invention. Preferably, such related polynucleotides are specifically excluded from the scope of the present invention. To list every related sequence is cumbersome. Accordingly, preferably excluded from the present invention are one or more polynucleotides comprising a nucleotide sequence described by the general formula of a−b, where a is any integer between 1 to 1691 of SEQ ID NO:35, b is an integer of 15 to 1705, where both a and b correspond to the positions of nucleotide residues shown in SEQ ID NO:35, and where b is greater than or equal to a+14.

[0261] Features of Protein Encoded by Gene No: 26

[0262] The translation product of this gene was shown to have homology to cytochrome b from Chanos chanos which is thought to be important in cellular metabolism (See Genbank Accession No.gb|AAA68619.1). When tested against U937 and fibroblast cell lines, supernatants removed from cells containing this gene activated both the GAS (gamma activating sequence) and EGR1 (early growth response gene 1) promoter elements. Thus, it is likely that this gene activates promyeloid cells, fibroblasts, or more generally, immune or integumentary cells or cell-types, through the JAK-STAT and/or EGR1 signal transduction pathway. GAS is a promoter element found upstream of many genes which are involved in the Jak-STAT pathway. The Jak-STAT pathway is a large, signal transduction pathway involved in the differentiation and proliferation of cells. Therefore, activation of the Jak-STAT pathway, reflected by the binding of the GAS element, can be used to indicate proteins involved in the proliferation and differentiation of cells. EGR1 is a separate signal transduction pathway from Jak-STAT, genes containing the EGR1 promoter are induced in various tissues and cell types upon activation, leading the cells to undergo differentiation and proliferation.

[0263] Preferred polypeptides of the invention comprise the following amino acid sequence: LTVTVRNPGSTHASGRPRRRSGVWARRGLVWQ (SEQ ID NO:426). Polynucleotides encoding these polypeptides are also provided. Included in this invention as preferred domains are cytochrome c domains, which were identified using the ProSite analysis tool. The concensus pattern of cytochrome c domains is as follows: C-CPWHF-CPWR-C-H-CFYW.

[0264] Preferred polypeptides of the invention comprise the following amino acid sequence: CVHCHR (SEQ ID NO:428). Polynucleotides encoding these polypeptides are also provided. Further preferred are polypeptides comprising the cytochrome C domain of the sequence referenced in Table 1 for this gene, and at least 5, 10, 15, 20, 25, 30, 50, or 75 additional contiguous amino acid residues of the same. The additional contiguous amino acid residues is N-terminal or C-terminal to the cytochrome c domain. Alternatively, the additional contiguous amino acid residues is both N-terminal and C-terminal to the cytochrome c domain, wherein the total N- and C-terminal contiguous amino acid residues equal the specified number. The above preferred polypeptide domain is characteristic of a signature specific to cytochrome c proteins.

[0265] In another embodiment, polypeptides comprising the amino acid sequence of the open reading frame upstream of the predicted signal peptide are contemplated by the present invention. Specifically, polypeptides of the invention comprise the following amino acid sequence: LTVTVRNPGSTHASGRPRRRSGVWARRGLVWQMWIAGPSWVPLRYVVWLMHLERICALHNCRGNMLSWP LQIRVAVLGCCTKTPAVGFLQVAGSPHSCQDPGPCSHSAAIFPPCERGLCGDGPRCVRGCVHCHRSLLH EPAWTQG (SEQ ID NO:427). Polynucleotides encoding these polypeptides are also provided.

[0266] This gene is expressed primarily in endometrial stromal cells and fetal brain tissue, and to a lesser extent, in microvascular endothelial cells.

[0267] Therefore, polynucleotides and polypeptides of the invention are useful as reagents for differential identification of the tissue(s) or cell type(s) present in a biological sample and for diagnosis of diseases and conditions which include, but are not limited to, metabolic, reproductive, neural, developmental, or vascular disorders, particularly vascular leak syndrome and inflammation. Similarly, polypeptides and antibodies directed to these polypeptides are useful in providing immunological probes for differential identification of the tissue(s) or cell type(s). For a number of disorders of the above tissues or cells, particularly of the endothelium, expression of this gene at significantly higher or lower levels is routinely detected in certain tissues or cell types (e.g., metabolic, reproductive, neural, developmental, vascular, and cancerous and wounded tissues) or bodily fluids (e.g., serum, plasma, amniotic fluid, urine, synovial fluid and spinal fluid) or another tissue or cell sample taken from an individual having such a disorder, relative to the standard gene expression level, i.e., the expression level in healthy tissue or bodily fluid from an individual not having the disorder.

[0268] Preferred polypeptides of the present invention comprise immunogenic epitopes shown in SEQ ID NO: 160 as residues: Pro-63 to Cys-72, Gly-88 to Cys-93. Polynucleotides encoding said polypeptides are also provided.

[0269] The tissue distribution in endometrial stromal cells, infant brain, and microvascular endothelial cells, combined with the detected GAS and EGR1 biological activities, indicates polynucleotides and polypeptides corresponding to this gene are useful for the treatment of various vascular disorders, which include, but are not limited to vascular leak syndrome, microvascular disease, atherosclerosis, aneurysm, stroke, embolism and inflammation.

[0270] Moreover, the expression within embryonic tissue and other cellular sources marked by proliferating cells indicates that this protein may play a role in the regulation of cellular division, and may show utility in the diagnosis and treatment of cancer and other proliferative disorders. Representative uses are described here and elsewhere herein. Similarly, developmental tissues rely on decisions involving cell differentiation and/or apoptosis in pattern formation. Thus this protein may also be involved in apoptosis or tissue.differentiation and could again be useful in cancer therapy. Furthermore, the protein may also be used to determine biological activity, to raise antibodies, as tissue markers, to isolate cognate ligands or receptors, to identify agents that modulate their interactions, in addition to its use as a nutritional supplement. Protein, as well as, antibodies directed against the protein may show utility as a tumor marker and/or immunotherapy targets for the above listed tissues.

[0271] Many polynucleotide sequences, such as EST sequences, are publicly available and accessible through sequence databases. Some of these sequences are related to SEQ ID NO:36 and may have been publicly available prior to conception of the present invention. Preferably, such related polynucleotides are specifically excluded from the scope of the present invention. To list every related sequence is cumbersome. Accordingly, preferably excluded from the present invention are one or more polynucleotides comprising a nucleotide sequence described by the general formula of a−b, where a is any integer between 1 to 1017 of SEQ ID NO:36, b is an integer of 15 to 1031, where both a and b correspond to the positions of nucleotide residues shown in SEQ ID NO:36, and where b is greater than or equal to a+14.

[0272] Features of Protein Encoded by Gene No: 27

[0273] The translation product of this gene was shown to have homology to the human and bovine butyrophilin protein (See Genbank Accession No. gb|AAB53424.1 and gb|AAC02655.1; all references avaiable through these accessions are hereby incorporated herein by reference; for example, Immunogenetics 47 (1), 55-63 (1997)). This gene encodes a novel cell surface molecule with IgG domains. It is expressed mainly in bone marrow and PBLs. It might play a role in the proliferation, activation, adhesion or differentiation of lymphocytes or their precursors.

[0274] Contact of cells with supernatant expressing the product of this gene has been shown to increase the permeability of the plasma membrane of HUVEC cells to calcium. Thus, it is likely that the product of this gene is involved in a signal transduction pathway that is initiated when the product binds a receptor on the surface of the plasma membrane of both vascular endothelial cells, in addition to other cell-lines or tissue cell types. Thus, polynucleotides and polypeptides have uses which include, but are not limited to, activating endothelial cells, or more generally, neural or immune cells. Binding of a ligand to a receptor is known to alter intracellular levels of small molecules, such as calcium, potassium and sodium, as well as alter pH and membrane potential. Alterations in small molecule concentration can be measured to identify supernatants which bind to receptors of a particular cell. This protein is homologous to members of the butyrophilin gene family which are thought to play a role in myelin sheath development, in addition to serving as a membrane-specific receptor for cytoplasmic vesicles to the apical plasma membrane.

[0275] In specific embodiments, polypeptides of the invention comprise the sequence TPCSAQFSVLGPSGPILAMVGEDADLPCHLFPTMSAET (SEQ ID NO:429), MELKWVSSSLRQVVNVYADGKEVEDRQSAPYRGRTSILRDGITAGKAALRIHNVTASDSG (SEQ ID NO:430), LEVKGYEDGGIHLECRSTGWYPQPQI (SEQ ID NO:431), MASSLAFLLL NFHVSLLLVQLLTPCSAQFSVLGPSGPILAMVGEDADLPCHLFPTMSAETMELKWVSSSLRQVVNVYAD G (SEQ ID NO:432), RHELSHNRKNGELLIDRLYSVGSDSPMGIPRDIIFTDGFPYWNPKVKTLKDRHFWQSIDENGKFPGFPS A QLSCLPPLGPAAHSLLSSVFCAWTLWAHPGHGG (SEQ ID NO:433), LLIDRLYSVGSDSPMGIPRDIIFT (SEQ ID NO:434), NPKVKTLKDRHFWQSIDENGKFPGF (SEQ ID NO:435), LGPAAHSLLSSVFCAWTLWAHPGH (SEQ ID NO:436), RLQHWVLIFTLEVKGYEDGGIHLECRSTGWYPQPQIQWSNAKGENIPAVEAPVVADGVGLYEVAASVIM RGGSGEGVSCIIRNSLLGLEKTASISIADPSSGAPSPGSQPWQGPCLSCCCFSPEPVTSCGDNRRK (SEQ ID NO:437), GGIHLECRSTGWYPQPQIQWSNAKG (SEQ ID NO:438), PQIQWSNAKGENIPAVEAPVVADGVGL (SEQ ID NO:439), NIPAVEAPWADGVGLYEVAASVIMRG (SEQ ID NO:440), SGAPSPGSQPWQGPCLSCCCFSPEPVT (SEQ ID NO:441), SSSICDHERRLRGGCILHHQKFPPRPGKDSQHFHRRPFFRSAQPWIAALAGTLPILLLLLAGASYFLWR QQKEITALSSEIESEQEMKEMGYAATEREISLRESLQEELKRKKIQYLTRGEESSSDTNKSA (SEQ ID NO:442), KDSQHFHRRPFFRSAQPWIAALAGTLPI (SEQ ID NO:443), EIESEQEMKE MGYAATEREISLRESLQE (SEQ ID NO:444), VNNMIAFYSARDSYVYPHFSGEEMLQMRLHLVK (SEQ ID NO:445), TPCSAQFSVLGPSGPILAMVGEDADLPCHLFPTMSAET (SEQ ID NO:446), KWVSSSLRQVVNVYADGKEVEDR (SEQ ID NO:447), RTSILRDGITAGKAALRIHNVTASD (SEQ ID NO:448), CYFQDGDFYEKALVELKVAALGS (SEQ ID NO:449), GYEDGGIHLECRSTGWYPQPQIQ (SEQ ID.NO:450), NIPAVEAPVVADGVGLYEVAASV (SEQ ID NO:451), QQKEITALSSEIESEQEMKEM (SEQ ID NO:452), LRESLQEELKRKKIQYLTRGEESS (SEQ ID NO:453), SAQFSVLGPSGPILAMVGEDADLPCHLFPTMSAETMELKW (SEQ ID NO:455), and/or GEEMLQMRLHLVK (SEQ ID NO:454). Polynucleotides encoding these polypeptides are also provided.

[0276] A preferred polypeptide fragment of the invention comprises the following amino acid sequence: MASSLAFLLLNFHVSLLLVQLLTPCSAQFSVLGPSGPILAMVGEDADLPCHLFPTMSAETMELKWVSSS LRQVVNVYADGKEVEDRQSAPYRGRTSILRDGITAGKAALRIHNVTASDSGKYLCYFQDGDFYEKALVE LKVAALGSNLHVGSEGL (SEQ ID NO:456). Polynucleotides encoding these polypeptides are also provided.

[0277] The gene encoding the disclosed cDNA is believed to reside on chromosome 6p22. Accordingly, polynucleotides related to this invention are useful as a marker in linkage analysis for chromosome 6p22.

[0278] This gene is expressed primarily in rhabdomyosarcoma, and to a lesser extent, in T cells.

[0279] Therefore, polynucleotides and polypeptides of the invention are useful as reagents for differential identification of the tissue(s) or cell type(s) present in a biological sample and for diagnosis of diseases and conditions which include, but are not limited to, muscle, immune, or neural disorders, particularly rhabdomyosarcoma, infectiou's Diseases, or neurodegenerative conditions. Similarly, polypeptides and antibodies directed to these polypeptides are useful in providing immunological probes for differential identification of the tissue(s) or cell type(s). For a number of disorders of the above tissues or cells, particularly of the immune system expression of this gene at significantly higher or lower levels is routinely detected in certain tissues or cell types (e.g., muscle, immune, neural, and cancerous and wounded tissues) or bodily fluids (e.g., serum, plasma, urine, synovial fluid and spinal fluid) or another tissue or cell sample taken from an individual having such a disorder, relative to the standard gene expression level, i.e., the expression level in healthy tissue or bodily fluid from an individual not having the disorder.

[0280] Preferred polypeptides of the present invention comprise immunogenic epitopes shown in SEQ ID NO: 161 as residues: Ala-80 to Arg-96, Lys-155 to Gly-161, Cys-166 to Gln-176, Ile-284 to Lys-291, Glu-306 to Lys-316, Thr-321 to Ala-334. Polynucleotides encoding said polypeptides are also provided.

[0281] The tissue distribution in rhabdomyosarcoma, the detected calcium flux biological activity, combined with the homology to the butyrophilin gene family indicates polynucleotides and polypeptides corresponding to this gene are useful for the diagnosis or treatment of muscle disorders, which include, but are not limited to, muscular dystrophy, cardiomyopathy, fibroids, myomas, and/or rhabdomyosarcomas. Representative uses are described in the “Regeneration” and “Hyperproliferative Disorders” sections below, in Example 11, 15, and 18, and elsewhere herein. Moreover, the homology to the butyrophilin protein indicates polynucleotides and polypeptides corresponding to this gene are useful for the detection/treatment of neurodegenerative disease states, behavioral disorders, or inflammatory conditions which include, but are not limited to Alzheimer's Disease, Parkinson's Disease, Huntington's Disease, Tourette Syndrome, meningitis, encephalitis, demyelinating diseases, peripheral neuropathies, neoplasia, trauma, congenital malformations, spinal cord injuries, ischemia and infarction, aneurysms, hemorrhages, schizophrenia, mania, dementia, paranoia, obsessive compulsive disorder, depression, panic disorder, learning disabilities, ALS, psychoses, autism, and altered behaviors, including disorders in feeding, sleep patterns, balance, and perception. In addition, elevated expression of this gene product in regions of the brain indicates that it plays a role in normal neural function.

[0282] Potentially, this gene product is involved in synapse formation, neurotransmission, learning, cognition, homeostasis, or neuronal differentiation or survival. The protein may also show utility in the correction or amelioration of myelin sheath deficiencies in developing and mature neurons and neural-cell types. Furthermore, the protein may also be used to determine biological activity, to raise antibodies, as tissue markers, to isolate cognate ligands or receptors, to identify agents that modulate their interactions, in addition to its use as a nutritional supplement. Protein, as well as, antibodies directed against the protein may show utility as a tumor marker and/or immunotherapy targets for the above listed tissues.

[0283] Many polynucleotide sequences, such as EST sequences, are publicly available and accessible through sequence databases. Some of these sequences are related to SEQ ID NO:37 and may have been publicly available prior to conception of the present invention. Preferably, such related polynucleotides are specifically excluded from the scope of the present invention. To list every related sequence is cumbersome. Accordingly, preferably excluded from the present invention are one or more polynucleotides comprising a nucleotide sequence described by the general formula of a−b, where a is any integer between 1 to 1628 of SEQ ID NO:37, b is an integer of 15 to 1642, where both a and b correspond to the positions of nucleotide residues shown in SEQ ID NO:37, and where b is greater than or equal to a+14.

[0284] Features of Protein Encoder by Gene No: 28

[0285] Preferred polypeptides of the invention comprise the following amino acid sequence: PQGGLTLPSVWG (SEQ ID NO:457), GGPCHLWLLGPRRTQLPGRRASLPFRSQGELTQAFLLGLWKHQMPALTQEQQVRAERRREAVRMEIPGL FFASLANWGLLYRTSQDFISPYLCAAPSTPHPPLGGP (SEQ ID NO:458), GPRRTQLPGRRASLPFRSQGELT (SEQ ID NO:459), QMPALTQEQQVRAERRREAVRMEI (SEQ ID NO:460), and/or ANWGLLYRTSQDFISPYLCAAPSTP (SEQ ID NO:461). Polynucleotides encoding these polypeptides are also provided.

[0286] The gene encoding the disclosed cDNA is believed to reside on chromosome 5. Accordingly, polynucleotides related to this invention are useful as a marker in linkage analysis for chromosome 5.

[0287] This gene is expressed primarily in brain, and to a lesser extent, in testes tumor.

[0288] Therefore, polynucleotides and polypeptides of the invention are useful as reagents for differential identification of the tissue(s) or cell type(s) present in a biological sample and for diagnosis of diseases and conditions which include, but are not limited to, neural, endocrine, or reproductive disorders, particularly depression and infertility disorders. Similarly, polypeptides and antibodies directed to these polypeptides are useful in providing immunological probes for differential identification of the tissue(s) or cell type(s). For a number of disorders of the above tissues or cells, particularly of the endocrine and nervous systems, expression of this gene at significantly higher or lower levels is routinely detected in certain tissues or cell types (e.g., neural, endocrine, reproductive, and cancerous and wounded tissues) or bodily fluids (e.g., serum, plasma, urine, seminal fluid, synovial fluid and spinal fluid) or another tissue or cell sample taken from an individual having such a disorder, relative to the standard gene expression level, i.e., the expression level in healthy tissue or bodily fluid from an individual not having the disorder.

[0289] Preferred polypeptides of the present invention comprise immunogenic epitopes shown in SEQ ID NO: 162 as residues: Thr-26 to Glu-33. Polynucleotides encoding said polypeptides are also provided.

[0290] The tissue distribution in brain indicates polynucleotides and polypeptides corresponding to this gene are useful for the diagnosis and treatment of depression and other endocrine-related disorders. Representative uses are described in the “Regeneration” and “Hyperproliferative Disorders” sections below, in Example 11, 15, and 18, and elsewhere herein. Moreover, polynucleotides and polypeptides corresponding to this gene are useful for the detection/treatment of neurodegenerative disease states, behavioral disorders, or inflammatory conditions which include, but are not limited to Alzheimer's Disease, Parkinson's Disease, Huntington's Disease, Tourette Syndrome, meningitis, encephalitis, demyelinating diseases, peripheral neuropathies, neoplasia, trauma, congenital malformations, spinal cord injuries, ischemia and infarction, aneurysms, hemorrhages, schizophrenia, mania, dementia, paranoia, obsessive compulsive disorder, depression, panic disorder, learning disabilities, ALS, psychoses, autism, and altered behaviors, including disorders in feeding, sleep patterns, balance, and perception. In addition, elevated expression of this gene product in regions of the brain indicates that it plays a role in normal neural function.

[0291] Potentially, this gene product is involved in synapse formation, neurotransmission, learning, cognition, homeostasis, or neuronal differentiation or survival. The protein product may also be useful in the treatment, detection, and/or prevention of a variety of reproductive disorders which include, but are not limited to, the treatment of male infertility, and/or could be used as a male contraceptive. Furthermore, the protein may also be used to determine biological activity, to raise antibodies, as tissue markers, to isolate cognate ligands or receptors, to identify agents that modulate their interactions, in addition to its use as a nutritional supplement. Protein, as well as, antibodies directed against the protein may show utility as a tumor marker and/or immunotherapy targets for the above listed tissues.

[0292] Many polynucleotide sequences, such as EST sequences, are publicly available and accessible through sequence databases. Some of these sequences are related to SEQ ID NO:38 and may have been publicly available prior to conception of the present invention. Preferably, such related polynucleotides are specifically excluded from the scope of the present invention. To list every related sequence is cumbersome. Accordingly, preferably excluded from the present invention are one or more polynucleotides comprising a nucleotide sequence described by the general formula of a−b, where a is any integer between 1 to 1074 of SEQ ID NO:38, b is an integer of 15 to 1088, where both a and b correspond to the positions of nucleotide residues shown in SEQ ID NO:38, and where b is greater than or equal to a +14.

[0293] Features of Protein Encoder by Gene No: 29

[0294] The translation product of this gene was found to have homology to the conserved R166.2 protein from Caenorhabditis elegans (See Genbank Accession No.gi|949849), which is thought to play an important role in the regulation of cellular function and processes. Moreover, the protein product of this gene also shares homology with the human cleft lip and palate transmembrane protein 1 (See Genbank Accession No. gb|AAC97420.11| (AF037338); all references available through this accession are hereby incorporated by reference herein; for example, Genomics 54 (2), 231-240 (1998)). In specific embodiments, polypeptides of the invention comprise the sequence: LSFKDKSTYIESSTKVYDDMAFRYLSWILFPLLG (SEQ ID NO:462), CYAVYSLLYLEHKGWYSWVLSM (SEQ ID NO:472), LLTFGFITMTPQLFINYKLKSVAHLPWRMLT (SEQ ID NO:463), TYKALNTFIDDLFAFVIKMPVKYRIGCLRD (SEQ ID NO:464), DVVFFIYLYQRWIYRVDPTRVNEFGMSGED (SEQ ID NO:465), VAGIFPRLSFKDKSTYIESSTKVYDDMAFRYLSWILFPLLGCYA (SEQ ID NO:466), PWVAGIFPRLSFKDKSTYIESSTKVYDD (SEQ ID NO:468), AGEDSCHPVLSVQPDVHDLGWQESSPAYPSRTSPRISSPRPKCMMIWHSGTCPGSSSRSWAAMPSTVFC TWSTRAGTPGCSACSTASC (SEQ ID NO:469), LSVQPDVHDLGWQESSPAYPSRTSPRISSP (SEQ ID NO:470), GSSSRSWAAMPSTVFCTWSTRAGTP (SEQ ID NO:471), and/or WAAMPSTVFCTWSTRAGTP (SEQ ID NO: 467). Polynucleotides encoding these polypeptides are also provided.

[0295] The gene encoding the disclosed cDNA is believed to reside on chromosome 19. Accordingly, polynucleotides related to this invention are useful as a marker in linkage analysis for chromosome 19.

[0296] This gene is expressed primarily in colon, smooth muscle and fetal bone.

[0297] Therefore, polynucleotides and polypeptides of the invention are useful as reagents for differential identification of the tissue(s) or cell type(s) present in a biological sample and for diagnosis of diseases and conditions which include, but are not limited to, gastrointestinal or vascular disorders, and abnormal muscular-skeletal development, including proliferative conditions such as cancer. Similarly, polypeptides and antibodies directed to these polypeptides are useful in providing immunological probes for differential identification of the tissue(s) or cell type(s). For a number of disorders of the above tissues or cells, particularly of the immune and musclar-skeletal system, expression of this gene at significantly higher or lower levels is routinely detected in certain tissues or cell types (e.g., gastrointestinal, muscle, skeletal, vascular, developmental, and cancerous and wounded tissues) or bodily fluids (e.g., serum, plasma, amniotic fluid, urine, synovial fluid and spinal fluid) or another tissue or cell sample taken from an individual having such a disorder, relative to the standard gene expression level, i.e., the expression level in healthy tissue or bodily fluid from an individual not having the disorder.

[0298] Preferred polypeptides of the present invention comprise immunogenic epitopes shown in SEQ ID NO: 163 as residues: Ser-128 to Thr-133, Thr-158 to Thr-166, Leu-168 to Gly-175, Ala-179 to Asp-196. Polynucleotides encoding said polypeptides are also provided.

[0299] The tissue distribution in colon and fetal bone indicates polynucleotides and polypeptides corresponding to this gene are useful for the treatment and diagnosis of abnormal bone formation, and/or various proliferative conditions (e.g. tumors), particularly of the gastrointestinal system. Representative uses are described here and elsewhere herein. Moreover, the expression within smooth muscle tissue indicates polynucleotides and polypeptides corresponding to this gene are useful for the detection, treatment, and/or prevention of a variety of vascular disorders, which include, but are not limited to the following: embolism, atherosclerosis, microvacular disease, aneurysm, stroke, and vascular leak syndrome. Furthermore, the protein may also be used to determine biological activity, to raise antibodies, as tissue markers, to isolate cognate ligands or receptors, to identify agents that modulate their interactions, in addition to its use as a nutritional supplement. Protein, as well as, antibodies directed against the protein may show utility as a tumor marker and/or immunotherapy targets for the above listed tissues.

[0300] Many polynucleotide sequences, such as EST sequences, are publicly available and accessible through sequence databases. Some of these sequences are related to SEQ ID NO:39 and may have been publicly available prior to conception of the present invention. Preferably, such related polynucleotides are specifically excluded from the scope of the present invention. To list every related sequence is cumbersome. Accordingly, preferably excluded from the present invention are one or more polynucleotides comprising a nucleotide sequence described by the general formula of a−b, where a is any integer between 1 to 1242 of SEQ ID NO:39, b is an integer of 15 to 1256, where both a and b correspond to the positions of nucleotide residues shown in SEQ ID NO:39, and where b is greater than or equal to a+14.

[0301] Features of Protein Encoder by Gene No: 30

[0302] Preferred polypeptides of the invention comprise the following amino acid sequence: LGEFLSSQCFLP (SEQ ID NO:473). Polynucleotides encoding these polypeptides are also provided.

[0303] This gene is expressed primarily in brain frontal cortex.

[0304] Therefore, polynucleotides and polypeptides of the invention are useful as reagents for differential identification of the tissue(s) or cell type(s) present in a biological sample and for diagnosis of diseases and conditions which include, but are not limited to, neural disorders, particularly neurological or neurodegenerative disorders and diseases. Similarly, polypeptides and antibodies directed to these polypeptides are useful in providing immunological probes for differential identification of the tissue(s) or cell type(s). For a number of disorders of the above tissues or cells, particularly of the brain, expression of this gene at significantly higher or lower levels is routinely detected in certain tissues or cell types (e.g., neural, and cancerous and wounded tissues) or bodily fluids (e.g., serum, plasma, urine, synovial fluid and spinal fluid) or another tissue or cell sample taken from an individual having such a disorder, relative to the standard gene expression level, i.e., the expression level in healthy tissue or bodily fluid from an individual not having the disorder.

[0305] Preferred polypeptides of the present invention comprise immunogenic epitopes shown in SEQ ID NO: 164 as residues: Ala-122 to Gly-128. Polynucleotides encoding said polypeptides are also provided.

[0306] The tissue distribution in brain frontal cortex indicates polynucleotides and polypeptides corresponding to this gene are useful for the diagnosis and treatment of some neurological diseases such as depression. Moreover, polynucleotides and polypeptides corresponding to this gene are useful for the detection/treatment of neurodegenerative disease states, behavioral disorders, or inflammatory conditions which include, but are not limited to Alzheimer's Disease, Parkinson's Disease, Huntington's Disease, Tourette Syndrome, meningitis, encephalitis, demyelinating diseases, peripheral neuropathies, neoplasia, trauma, congenital malformations, spinal cord injuries, ischemia and infarction, aneurysms, hemorrhages, schizophrenia, mania, dementia, paranoia, obsessive compulsive disorder, depression, panic disorder, learning disabilities, ALS, psychoses, autism, and altered behaviors, including disorders in feeding, sleep patterns, balance, and perception. In addition, elevated expression of this gene product in regions of the brain indicates that it plays a role in normal neural function.

[0307] Potentially, this gene product is involved in synapse formation, neurotransmission, learning, cognition, homeostasis, or neuronal differentiation or survival. Protein, as well as, antibodies directed against the protein may show utility as a tumor marker and/or immunotherapy targets for the above listed tissues.

[0308] Many polynucleotide sequences, such as EST sequences, are publicly available and accessible through sequence databases. Some of these sequences are related to SEQ ID NO:40 and may have been publicly available prior to conception of the present invention. Preferably, such related polynucleotides are specifically excluded from the scope of the present invention. To list every related sequence is cumbersome. Accordingly, preferably excluded from the present invention are one or more polynucleotides comprising a nucleotide sequence described by the general formula of a−b, where a is any integer between 1 to 1588 of SEQ ID NO:40, b is an integer of 15 to 1602, where both a and b correspond to the positions of nucleotide residues shown in SEQ ID NO:40, and where b is greater than or equal to a+14.

[0309] Features of Protein Encoder by Gene No: 31

[0310] Preferred polypeptides of the invention comprise the following amino acid sequence: RGXPSWPMHTLVYAQHSTTHTPLIQPQWTQVIDQPPGITHQFCVRXCXCPTLESCVQECVTRSRXKPTT GVPGPQRLA (SEQ ID NO:474), TPLIQPQWTQVIDQPPGITHQFCV (SEQ ID NO:475), ALGPSQTCDLDVWLVAKPSFFRGPQGIHYFSLWRRKPLSHWVSIWQLQGQETMPAMLRSRPAGQATVAT GPPRGSPSPQDLPSYHRKQVESSHRHSWEPASQSQ (SEQ ID NO:476), CDLDVWLVAKPSFFRGPQGIHYFSLWRR (SEQ ID NO:477), and/or AGQATVATGPPRGSPSPQDLPSYHRKQV (SEQ ID NO:478).

[0311] In another embodiment, polypeptides comprising the amino acid sequence of the open reading frame upstream of the predicted signal peptide are contemplated by the present invention. Specifically, polypeptides of the invention comprise the following amino acid sequence: PFPLLPPKRRGLLYHLIQKSTLGLVVWFREHLDSRSQMTSSLFIFLFLWFCPPPRISFVLCWPQPHSQV HIQHEKADHLFQSLKQKAPGLLQWARIV (SEQ ID NO:479). Polynucleotides encoding these polypeptides are also provided.

[0312] This gene is expressed primarily in synovial fibroblasts, and to a lesser extent, in endothelial cells.

[0313] Therefore, polynucleotides and polypeptides of the invention are useful as reagents for differential identification of the tissue(s) or cell type(s) present in a biological sample and for diagnosis of diseases and conditions which include, but are not limited to, skeletal or vascular disorders, particularly arthritis. Similarly, polypeptides and antibodies directed to these polypeptides are useful in providing immunological probes for differential identification of the tissue(s) or cell type(s). For a number of disorders of the above tissues or cells, particularly of the skeletal system, expression of this gene at significantly higher or lower levels is routinely detected in certain tissues or cell types (e.g., skeletal, vascular, endothelial, and cancerous and wounded tissues) or bodily fluids (e.g., lymph, serum, plasma, urine,.synovial fluid and spinal fluid) or another tissue or cell sample taken from an individual having such a disorder, relative to the standard gene expression level, i.e., the expression level in healthy tissue or bodily fluid from an individual not having the disorder.

[0314] The tissue distribution in synovial fibroblasts indicates polynucleotides and polypeptides corresponding to this gene are useful for treatment of arthritis. Moreover, polynucleotides and polypeptides corresponding to this gene are useful in the detection and treatment of disorders and conditions afflicting the skeletal system, in particular osteoporosis, bone cancer, as well as, disorders afflicting connective tissues (e.g., arthritis, trauma, tendonitis, chrondomalacia and inflammation), such as in the diagnosis or treatment of various autoimmune disorders such as rheumatoid arthritis, lupus, scleroderma, and dermatomyositis as well as dwarfism, spinal deformation, and specific joint abnormalities as well as chondrodysplasias (i.e., spondyloepiphyseal dysplasia congenita, familial osteoarthritis, Atelosteogenesis type II, metaphyseal chondrodysplasia type Schmid). The protein product of this gene may also be useful for the detection, treatment, and/or prevention of a variety of vascular disorders which include, but are not limited to, atherosclerosis, embolism, stroke, microvascular disease, or aneurysm. The protein may also be useful in the treatment of integumentary disorders, particularly those related to aberrations in the extracellular matrix or lamina. Furthermore, the protein may also be used to determine biological activity, to raise antibodies, as tissue markers, to isolate cognate ligands or receptors, to identify agents that modulate their interactions, in addition to its use as a nutritional supplement. Protein, as well as, antibodies directed against the protein may show utility as a tumor marker and/or immunotherapy targets for the above listed tissues.

[0315] Many polynucleotide sequences, such as EST sequences, are publicly available and accessible through sequence databases. Some of these sequences are related to SEQ ID NO:41 and may have been publicly available prior to conception of the present invention. Preferably, such related polynucleotides are specifically excluded from the scope of the present invention. To list every related sequence is cumbersome. Accordingly, preferably excluded from the present invention are one or more polynucleotides comprising a nucleotide sequence described by the general formula of a−b, where a is any integer between 1 to 1219 of SEQ ID NO:41, b is an integer of 15 to 1233, where both a and b correspond to the positions of nucleotide residues shown in SEQ ID NO:41, and where b is greater than or equal to a+14.

[0316] Features of Protein Encoder by Gene No: 32

[0317] Preferred polypeptides of the invention comprise the following amino acid sequence: YRESCTLQYRPEFPGRPTRPRGSCPQYPGP (SEQ ID NO:480), GKLYAAVPSGIPGSTHASARLMPPVSRSSYSEDIVGSRRRRRSSSGSPPSPQSRCSSWDGCSRSHSRGR EGXRPPWSELDVGALYPFSRSGSRGRLPRFRNYAFASSWSTSYSGYRYHRALLCRRTAVSGRLREGREP SAEEAEGEREDWGIGSA (SEQ ID NO:481), SGIPGSTHASARLMPPVSRSSYS (SEQ ID NO:482), GCSRSHSRGREGXRPPWSELDVGALYPFS (SEQ ID NO:483), TAVSGRLREGREPSAEEAEGEREDW (SEQ ID NO:484), RIRKAAVQIPTRKNIGXRRPVWQETRKKERISRLKESIGNILIVTVTQSLTQILTLMMIKRELKPRRKR RKRNTKQXKRRIRKPKKNPVTQAVKTQKRTCQKLPGMEQPNVADTMDLIGPEAPINTYLFKMKNL (SEQ ID NO:485), TRKKERISRLKESIGNILIVTVTQSLTQ (SEQ,ID NO:486), and/or VKTQKRTCQKLPGMEQPNVADTMDLIGP (SEQ ID NO:487).

[0318] In another embodiment, polypeptides comprising the amino acid sequence of the open reading frame upstream of the predicted signal peptide are contemplated by the present invention. Specifically, polypeptides of the invention comprise the following amino acid sequence: XGDTXTQNSRHDTPXLIDYYRESCTLQYRPEFPGRPTRPRGSCPQYPGPAIPRTSWALGEGDAAPRGAH HPRRADVPLGMAVPALTPAAVRAXGLLGVSWTWALFTPLVALGREGGSQDSATTPSRPPGRPRIVDIAT IVHCYAEERQSAEDYEKEESHRQRRLKERERIGELGAPEVWGPSPKFPQLDSDEHTPVEDEEEVTHQKS SSSDSNSEEHRKXKTSRSRNKKKRKNKSSKRKHRKYSDSDSNSESDTNSDSDDDKKRVKAKKKKKKKKH KTKKKKNKKTKKESSDSSCKDSEEDLSEATWDGAAKCGRYYGFNRARSTY (SEQ ID NO:488). Polynucleotides encoding these polypeptides are also provided.

[0319] The gene encoding the disclosed cDNA is believed to reside on chromosome 6. Accordingly, polynucleotides related to this invention are useful as a marker in linkage analysis for chromosome 6.

[0320] This gene is expressed primarily in retina.

[0321] Therefore, polynucleotides and polypeptides of the invention are useful as reagents for differential identification of the tissue(s) or cell type(s) present in a biological sample and for diagnosis of diseases and conditions which include, but are not limited to, visual disorders, particularly retinopathy. Similarly, polypeptides and antibodies directed to these polypeptides are useful in providing immunological probes for differential identification of the tissue(s) or cell type(s). For a number of disorders of the above tissues or cells, particularly of the ocular system, expression of this gene at significantly higher or lower levels is routinely detected in certain tissues or cell types (e.g. cancerous and wounded tissues) or bodily fluids (e.g., lymph, serum, plasma, urine, vitreous humor, aqueous humor, synovial fluid and spinal fluid) or another tissue or cell sample taken from an individual having such a disorder, relative to the standard gene expression level, i.e., the expression level in healthy tissue or bodily fluid from an individual not having the disorder.

[0322] The tissue distribution in retina indicates that polynucleotides and polypeptides corresponding to this gene are useful for the diagnosis, treatment, and/or prevention of diseases of, the retina, for example, diabetic retinopathy and retinoblastoma. Additionally, the polynucleotides and polypeptides corresponding to this gene is involved in normal lens development, formation of pigment cells, and the elimination of excess cells from mature ommatidia. Therefore the gene product could be used to treat abnormalities of the lens, pigment cells or cones, such as, cataracts, albinism, color blindness, and/or macular degeneration. Furthermore, the protein may also be used to determine biological activity, to raise antibodies, as tissue markers, to isolate cognate ligands or receptors, to identify agents that modulate their interactions, in addition to its use as a nutritional supplement. Protein, as well as, antibodies directed against the protein may show utility as a tumor marker and/or immunotherapy targets for the above listed tissues.

[0323] Many polynucleotide sequences, such as EST sequences, are publicly available and accessible through sequence databases. Some of these sequences are related to SEQ ID NO:42 and may have been publicly available prior to conception of the present invention. Preferably, such related polynucleotides are specifically excluded from the scope of the present invention. To list every related sequence is cumbersome. Accordingly, preferably excluded from the present invention are one or more polynucleotides comprising a nucleotide sequence described by the general formula of a−b, where a is any integer between 1 to 1076 of SEQ ID NO:42, b is an integer of 15 to 1090, where both a and b correspond to the positions of nucleotide residues shown in SEQ ID NO:42, and where b is greater than or equal to a+14.

[0324] Features of Protein Encoder by Gene No: 33

[0325] When tested against U937 cell lines, supernatants removed from cells containing this gene activated the GAS (gamma activating sequence) promoter element. Thus, it is likely that this gene activates pro-myeloid cells, or more generally, immune or hematopoietic cells, through the JAK-STAT signal transduction pathway. GAS is a promoter element found upstream of many genes which are involved in the Jak-STAT pathway. The Jak-STAT pathway is a large, signal transduction pathway involved in the differentiation and proliferation of cells. Therefore, activation of the Jak-STAT pathway, reflected by the binding of the GAS element, can be used to indicate proteins involved in the proliferation and differentiation of cells.

[0326] Preferred polypeptides of the invention comprise the following amino acid sequence: RSRRNRVAMGMWASLDALWE (SEQ ID NO:489), PRVRCQQRAEGGMGAGIGVGPSERTDIAVTPRGRSEGASVGVAPVHAEGAGGTGWPWGCGHRWTLCGRC RPRSVSSGPCCSFPGQCIFGRPS (SEQ ID NO:490), GGMGAGIGVGPSERTDIAVTPRGR (SEQ ID NO:491), GCGHRWTLCGRCRPRSVSSGPCCSFP (SEQ ID NO:492), and/or KKHGFNQQTLGFFTWKYNKNKNLV (SEQ ID NO:493). Polynucleotides encoding these polypeptides are also provided.

[0327] The gene encoding the disclosed cDNA is believed to reside on chromosome 1. Accordingly, polynucleotides related to this invention are useful as a marker in linkage analysis for chromosome 1.

[0328] This gene is expressed primarily in synovial cells.

[0329] Therefore, polynucleotides and polypeptides of the invention are useful as reagents for differential identification of the tissue(s) or cell type(s) present in a biological sample and for diagnosis of diseases and conditions which include, but are not limited to, skeletal afflictions, particularly rheumatoid arthritis or autoimmune conditions. Similarly, polypeptides and antibodies directed to these polypeptides are useful in providing immunological probes for differential identification of the tissue(s) or cell type(s). For a number of disorders of the above tissues or cells, particularly of the immune system, expression of this gene at significantly higher or lower levels is routinely detected in certain tissues or cell types (e.g., skeletal, and cancerous and wounded tissues) or bodily fluids (e.g., serum, plasma, urine, synovial fluid and spinal fluid) or another tissue or cell sample taken from an individual having such a disorder, relative to the standard gene expression level, i.e., the expression level in healthy tissue or bodily fluid from an individual not having the disorder.

[0330] Preferred polypeptides of the present invention comprise immunogenic epitopes shown in SEQ ID NO: 167 as residues: Gln-27 to Val-39, Glu-50 to Arg-56. Polynucleotides encoding said polypeptides are also provided.

[0331] The restricted tissue distribution in synovium, combined with the detected GAS biological activity, indicates polynucleotides and polypeptides corresponding to this gene are useful for the treatment and diagnosis of rheumatoid arthritis since synovial fibroblasts are associated with the synovium and cartilage. Moreover, polynucleotides and polypeptides corresponding to this gene are useful in the detection and treatment of disorders and conditions afflicting the skeletal system, in particular osteoporosis, bone cancer, as well as, disorders afflicting connective tissues (e.g. arthritis, trauma, tendonitis, chrondomalacia and inflammation), such as in the diagnosis or treatment of various autoimmune disorders such as rheumatoid arthritis, lupus, scleroderma, and dermatomyositis as well as dwarfism, spinal deformation, and specific joint abnormalities as well as chondrodysplasias (i.e. spondyloepiphyseal dysplasia congenita, familial osteoarthritis, Atelosteogenesis type II, metaphyseal chondrodysplasia type Schmid). The protein may also be useful in the modulation of the immune response to regions of inflammation, or in inhibiting or ameliorating autoimmune responses. Protein, as well as, antibodies directed against the protein may show utility as a tumor marker and/or immunotherapy targets for the above listed tissues.

[0332] Many polynucleotide sequences, such as EST sequences, are publicly available and accessible through sequence databases. Some of these sequences are related to SEQ ID NO:43 and may have been publicly available prior to conception of the present invention. Preferably, such related polynucleotides are specifically excluded from the scope of the present invention. To list every related sequence is cumbersome. Accordingly, preferably excluded from the present invention are one or more polynucleotides comprising a nucleotide sequence described by the general formula of a−b, where a is any integer between 1 to 924 of SEQ ID NO:43, b is an integer of 15 to 938, where both a and b correspond to the positions of nucleotide residues shown in SEQ ID NO:43, and where b is greater than or equal to a+14.

[0333] Features of Protein Encoder by Gene No: 34

[0334] When tested against U937 cell lines, supernatants removed from cells containing this gene activated the GAS (gamma activating sequence) promoter element. Thus, it is likely that this gene activates pro-myeloid cells, or more generally immune or hematopoietic cells, in addition to other cells or cell-types, through the JAK-STAT signal transduction pathway. GAS is a promoter element found upstream of many genes which are involved in the Jak-STAT pathway. The Jak-STAT pathway is a large, signal transduction pathway involved in the differentiation and proliferation of cells. Therefore, activation of the Jak-STAT pathway, reflected by the binding of the GAS element, can be used to indicate proteins involved in the proliferation and differentiation of cells.

[0335] Preferred polypeptides of the invention comprise the following amino acid sequence: PKLLPCSPAEGHTSLGPLLPF (SEQ ID NO:494), ASLELXPSKSQLSTEWGFTWIVGLGMSPSTALWTECTCTPFLVLLSHASGHFFWLSPLASLVIPPVTDR K (SEQ ID NO:495), WGFTWIVGLGMSPSTALWTECTCTPFLVLLSH (SEQ ID NO:496), VAVGVCREDVMGITDRSKMSPDVGIWAIYWSAAGYWPLIGFPGTPTQQEPALHRVGVYLDRGTGNVSFY SAVDGVHLHTFSCSSVSRLRPFFLVESISIFSHSTSD (SEQ ID NO:497), ITDRSKMSPDVGIWAIYWSAAGYWPLI (SEQ ID NO:498), and/or RGTGNVSFYSAVDGVHLHTFSCSSVSRLRP (SEQ ID NO:499). Polynucleotides encoding these polypeptides are also provided.

[0336] The gene encoding the disclosed cDNA is believed to reside on chromosome 7. Accordingly, polynucleotides related to this invention are useful as a marker in linkage analysis for chromosome 7.

[0337] This gene is expressed primarily in fetal tissues, and to a lesser extent, in liver cells.

[0338] Therefore, polynucleotides and polypeptides of the invention are useful as reagents for differential identification of the tissue(s) or cell type(s) present in a biological sample and for diagnosis of diseases and conditions which include, but are not limited to, developmental or liver diseases, such as hepatocellular carcinoma. Similarly, polypeptides and antibodies directed to these polypeptides are useful in providing immunological probes for differential identification of the tissue(s) or cell type(s). For a number of disorders of the above tissues or cells, particularly of the immune and hepatic systems, expression of this gene at significantly higher or lower levels is routinely detected in certain tissues or cell types (e.g., developmental, hepatic, metabolic, and cancerous and wounded tissues) or bodily fluids (e.g., serum, plasma, bile, breast milk, urine, synovial fluid and spinal fluid) or another tissue or cell sample taken from an individual having such a disorder, relative to the standard gene expression level, i.e., the expression level in healthy tissue or bodily fluid from an individual not having the disorder.

[0339] Preferred polypeptides of the present invention comprise immunogenic epitopes shown in SEQ ID NO: 168 as residues: Pro-30 to Gln-37, Arg-39 to Ser-45, Arg-74 to Arg-85. Polynucleotides encoding said polypeptides are also provided.

[0340] The tissue distribution in liver, combined with the detected GAS biological activity indicates polynucleotides and polypeptides corresponding to this gene are useful for the treatment or diagnosis of hepatic conditions such as hepatocellular carcinoma. Moreover, the expression within embryonic tissue and other cellular sources marked by proliferating cells indicates that this protein may play a role in the regulation of cellular division, and may show utility in the diagnosis and treatment of cancer and other proliferative disorders. Similarly, developmental tissues rely on decisions involving cell differentiation and/or apoptosis in pattern formation. Thus this protein may also be involved in apoptosis or tissue differentiation and could again be useful in cancer therapy. Protein, as well as, antibodies directed against the protein may show utility as a tumor marker and/or immunotherapy targets for the above listed tissues.

[0341] Many polynucleotide sequences, such as EST sequences, are publicly available and accessible through sequence databases. Some of these sequences are related to SEQ ID NO:44 and may have been publicly available prior to conception of the present invention. Preferably, such related polynucleotides are specifically excluded from the scope of the present invention. To list every related sequence is cumbersome. Accordingly, preferably excluded from the present invention are one or more polynucleotides comprising a nucleotide sequence described by the general formula of a−b, where a is any integer between 1 to 1571 of SEQ ID NO:44, b is an integer of 15 to 1585, where both a and b correspond to the positions of nucleotide residues shown in SEQ ID NO:44, and where b is greater than or equal to a+14.

[0342] Features of Protein Encoder by Gene No: 35

[0343] Preferred polypeptides of the invention comprise the following amino acid sequence: GTRGLQNHRTE (SEQ ID NO:500). Polynucleotides encoding these polypeptides are also provided.

[0344] This gene is expressed primarily in prostate, and to a lesser extent, in tonsil and fetal lung.

[0345] Therefore, polynucleotides and polypeptides of the invention are useful as reagents for differential identification of the tissue(s) or cell type(s) present in a biological sample and for diagnosis of diseases and conditions which include, but are not limited to, reproductive, immune, developmental, or pulmonary disorders and/or diseases. Similarly, polypeptides and antibodies directed to these polypeptides are useful in providing immunological probes for differential identification of the tissue(s) or cell type(s). For a number of disorders of the above tissues or cells, particularly of the immune system, expression of this gene at significantly higher or lower levels is routinely detected in certain tissues or cell types (e.g., reproductive, immune, developmental, pulmonary, and cancerous and wounded tissues) or bodily fluids (e.g., serum, plasma, amniotic fluid, pulmonary surfactant or sputum, urine, synovial fluid and spinal fluid) or another tissue or cell sample taken from an individual having such a disorder, relative to the standard gene expression level, i.e., the expression level in healthy tissue or bodily fluid from an individual not having the disorder.

[0346] Preferred polypeptides of the present invention comprise immunogenic epitopes shown in SEQ ID NO: 169 as residues: Lys-32 to Lys-38. Polynucleotides encoding said polypeptides are also provided.

[0347] The tissue distribution in prostate indicates polynucleotides and polypeptides corresponding to this gene are useful for the treatment and diagnosis of cancers, particularly of the prostate. The expression within tonsils indicates polynucleotides and polypeptides corresponding to this gene are useful for the diagnosis and treatment of a variety of immune system disorders. The expression also indicates a role in regulating the proliferation; survival; differentiation; and/or activation of hematopoietic cell lineages, including blood stem cells. Moreover, the expression within fetal tissue indicates that this protein may play a role in the regulation of cellular division, and may show utility in the diagnosis and treatment of cancer and other proliferative disorders. Similarly, developmental tissues rely on decisions involving cell differentiation and/or apoptosis in pattern formation. Thus this protein may also be involved in apoptosis or tissue differentiation and could again be useful in cancer therapy. Protein, as well as, antibodies directed against the protein may show utility as a tumor marker and/or immunotherapy targets for the above listed tissues.

[0348] Many polynucleotide sequences, such as EST sequences, are publicly available and accessible through sequence databases. Some of these sequences are related to SEQ ID NO:45 and may have been publicly available prior to conception of the present invention. Preferably, such related polynucleotides are specifically excluded from the scope of the present invention. To list every related sequence is cumbersome. Accordingly, preferably excluded from the present invention are one or more polynucleotides comprising a nucleotide sequence described by the general formula of a−b, where a is any integer between 1 to 1662 of SEQ ID NO:45, b is an integer of 15 to 1676, where both a and b correspond to the positions of nucleotide residues shown in SEQ ID NO:45, and where b is greater than or equal to a+14.

[0349] Features of Protein Encoder by Gene No: 36

[0350] Preferred polypeptides of the invention comprise the following amino acid sequence: ELSGLG (SEQ ID NO:501). Polynucleotides encoding these polypeptides are also provided.

[0351] This gene is expressed primarily in the brain.

[0352] Therefore, polynucleotides and polypeptides of the invention are useful as reagents for differential identification of the tissue(s) or cell type(s) present in a biological sample and for diagnosis of diseases and conditions which include, but are not limited to, central nervous system disorders. Similarly, polypeptides and antibodies directed to these polypeptides are useful in providing immunological probes for differential identification of the tissue(s) or cell type(s). For a number of disorders of the above tissues or cells, particularly of the central nervous system, expression of this gene at significantly higher or lower levels is routinely detected in certain tissues or cell types (e.g., neural, and cancerous and wounded tissues) or bodily fluids (e.g., serum, plasma, urine, synovial fluid and spinal fluid) or another tissue or cell sample taken from an individual having such a disorder, relative to the standard gene expression level, i.e., the expression level in healthy tissue or bodily fluid from an individual not having the disorder.

[0353] Preferred polypeptides of the present invention comprise immunogenic epitopes shown in SEQ ID NO: 170 as residues: Tyr-15 to Lys-21, Pro-62 to Phe-68. Polynucleotides encoding said polypeptides are also provided.

[0354] The tissue distribution in brain indicates polynucleotides and polypeptides corresponding to this gene are useful for the diagnosis, treatment, and/or prevention of CNS disorders (such as Parkinson's Disease). Moreover, polynucleotides and polypeptides corresponding to this gene are useful for the detection/treatment of neurodegenerative disease states, behavioral disorders, or inflammatory conditions which include, but are not limited to Alzheimer's Disease, Huntington's Disease, Tourette Syndrome, meningitis, encephalitis, demyelinating diseases, peripheral neuropathies, neoplasia, trauma, congenital malformations, spinal cord injuries, ischemia and infarction, aneurysms, hemorrhages, schizophrenia, mania, dementia, paranoia, obsessive compulsive disorder, depression, panic disorder, learning disabilities, ALS, psychoses, autism, and altered behaviors, including disorders in feeding, sleep patterns, balance, and perception. In addition, elevated expression of this gene product in regions of the brain indicates that it plays a role in normal neural function.

[0355] Potentially, this gene product is involved in synapse formation, neurotransmission, learning, cognition, homeostasis, or neuronal differentiation or survival. Protein, as well as, antibodies directed against the protein may show utility as a tumor marker and/or immunotherapy targets for the above listed tissues.

[0356] Many polynucleotide sequences, such as EST sequences, are publicly available and accessible through sequence databases. Some of these sequences are related to SEQ ID NO:46 and may have been publicly available prior to conception of the present invention. Preferably, such related polynucleotides are specifically excluded from the scope of the present invention. To list every related sequence is cumbersome. Accordingly, preferably excluded from the present invention are one or more polynucleotides comprising a nucleotide sequence described by the general formula of a−b, where a is any integer between 1 to 1330 of SEQ ID NO:46, b is an integer of 15 to 1344, where both a and b correspond to the positions of nucleotide residues shown in SEQ ID NO:46, and where b is greater than or equal to a+14.

[0357] Features of Protein Encoder by Gene No: 37

[0358] The gene encoding the disclosed cDNA is believed to reside on chromosome 3. Accordingly, polynucleotides related to this invention are useful as a marker in linkage analysis for chromosome 3.

[0359] This gene is expressed primarily in the brain.

[0360] Therefore, polynucleotides and polypeptides of the invention are useful as reagents for differential identification of the tissue(s) or cell type(s) present in a biological sample and for diagnosis of diseases and conditions which include, but are not limited to, CN's Diseases, such as Alzheimers and Parkinson's Disease. Similarly, polypeptides and antibodies directed to these polypeptides are useful in providing immunological probes for differential identification of the tissue(s) or cell type(s). For a number of disorders of the above tissues or cells, particularly of the central nervous system, expression of this gene at significantly higher or lower levels is routinely detected in certain tissues or cell types (e.g., neural, and cancerous and wounded tissues) or bodily fluids (e.g., serum, plasma, urine, synovial fluid and spinal fluid) or another tissue or cell sample taken from an individual having such a disorder, relative to the standard gene expression level, i.e., the expression level in healthy tissue or bodily fluid from an individual not having the disorder.

[0361] Preferred polypeptides of the present invention comprise immunogenic epitopes shown in SEQ ID NO: 171 as residues: Asp-44 to Cys-53, Asp-56 to Lys-66, Ser-78 to Lys-84. Polynucleotides encoding said polypeptides are also provided.

[0362] The tissue distribution in brain tissue indicates polynucleotides and polypeptides corresponding to this gene are useful for the diagnosis, treatment, and/or prevention of CN's Diseases such as Alzheimers and Parkinson's Disease. Moreover, polynucleotides and polypeptides corresponding to this gene are useful for the detection/treatment of neurodegenerative disease states, behavioral disorders, or inflammatory conditions which include, but are not limited to Huntington's Disease, Tourette Syndrome, meningitis, encephalitis, demyelinating diseases, peripheral neuropathies, neoplasia, trauma, congenital malformations, spinal cord injuries, ischemia and infarction, aneurysms, hemorrhages, schizophrenia, mania, dementia, paranoia, obsessive compulsive disorder, depression, panic disorder, learning disabilities, ALS, psychoses, autism, and altered behaviors, including disorders in feeding, sleep patterns, balance, and perception. In addition, elevated expression of this gene product in regions of the brain indicates that it plays a role in normal neural function.

[0363] Potentially, this gene product is involved in synapse formation, neurotransmission, learning, cognition, homeostasis, or neuronal differentiation or survival. Protein, as well as, antibodies directed against the protein may show utility as a tumor marker and/or immunotherapy targets for the above listed tissues.

[0364] Many polynucleotide sequences, such as EST sequences, are publicly available and accessible through sequence databases. Some of these sequences are related to SEQ ID NO:47 and may have been publicly available prior to conception of the present invention. Preferably, such related polynucleotides are specifically excluded from the scope of the present invention. To list every related sequence is cumbersome. Accordingly, preferably excluded from the present invention are one or more polynucleotides comprising a nucleotide sequence described by the general formula of a−b, where a is any integer between 1 to 1460 of SEQ ID NO:47, b is an integer of 15 to 1474, where both a and b correspond to the positions of nucleotide residues shown in SEQ ID NO:47 and where b is greater than or equal to a+14.

[0365] Features of Protein Encoder by Gene No: 38

[0366] The translation product of this gene shares sequence homology with ras-related proteins in rats which is thought to be involved in cellular signaling.

[0367] This gene is expressed primarily in T-cells.

[0368] Therefore, polynucleotides and polypeptides of the invention are useful as reagents for differential identification of the tissue(s) or cell type(s) present in a biological sample and for diagnosis of diseases and conditions which include, but are not limited to, immune system disorders. Similarly, polypeptides and antibodies directed to these polypeptides are useful in providing immunological probes for differential identification of the tissue(s) or cell type(s). For a number of disorders of the above tissues or cells, particularly of the immune system, expression of this gene at significantly higher or lower levels is routinely detected in certain tissues or cell types (e.g., immune, cancerous and wounded tissues) or bodily fluids (e.g., serum, plasma, urine, synovial fluid and spinal fluid) or another tissue or cell sample taken from an individual having such a disorder, relative to the standard gene expression level, i.e., the expression level in healthy tissue or bodily fluid from an individual not having the disorder.

[0369] Preferred polypeptides of the present invention comprise immunogenic epitopes.shown in SEQ ID NO: 172 as residues: Met-40 to Thr-46, Ala-57 to Glu-64, Ser-85 to Leu-91. Polynucleotides encoding said polypeptides are also provided.

[0370] The tissue distribution in immune system tissues indicates polynucleotides and polypeptides corresponding to this gene are useful for the diagnosis and treatment of a variety of immune system disorders. This gene product is involved in the regulation of cytokine production, antigen presentation, or other processes that may also suggest a usefulness in the treatment of cancer (e.g. by boosting immune responses).

[0371] Since the gene is expressed in cells of lymphoid origin, the gene or protein, as well as, antibodies directed against the protein may show utility as a tumor marker and/or immunotherapy targets for the above listed tissues. Therefore it is also used as an agent for immunological disorders including arthritis, asthma, immune deficiency diseases such as AIDS, leukemia. rheumatoid arthritis, inflammatory bowel disease, sepsis, acne, and psoriasis. In addition, this gene product may have commercial utility in the expansion of stem cells and committed progenitors of various blood lineages, and in the differentiation and/or proliferation of various cell types. Expression of this gene product in T cells also strongly indicates a role for this protein in immune function and immune surveillance. Protein, as well as, antibodies directed against the protein may show utility as a tumor marker and/or immunotherapy targets for the above listed tissues.

[0372] Many polynucleotide sequences, such as EST sequences, are publicly available and accessible through sequence databases. Some of these sequences are related to SEQ ID NO:48 and may have been publicly available prior to conception of the present invention. Preferably, such related polynucleotides are specifically excluded from the scope of the present invention. To list every related sequence is cumbersome. Accordingly, preferably excluded from the present invention are one or more polynucleotides comprising a nucleotide sequence described by the general formula of a−b, where a is any integer between 1 to 825 of SEQ ID NO:48, b is an integer of 15 to 839, where both a and b correspond to the positions of nucleotide residues shown in SEQ ID NO:48, and where b is greater than or equal to a+14.

[0373] Features of Protein Encoder by Gene No: 39

[0374] When tested against U937 Myeloid cell lines, supernatants removed from cells containing this gene activated the GAS assay. Thus, it is likely that this gene activates myeloid cells through the Jak-STAT signal transduction pathway. The gamma activating sequence (GAS) is a promoter element found upstream of many genes which are involved in the Jak-STAT pathway. The Jak-STAT pathway is a large, signal transduction pathway involved in the differentiation and proliferation of cells. Therefore, activation of the Jak-STAT pathway, reflected by the binding of the GAS element, can be used to indicate proteins involved in the proliferation and differentiation of cells.

[0375] This gene is expressed primarily in fetal liver, osteoclastoma and neutrophils.

[0376] Therefore, polynucleotides and polypeptides of the invention are useful as reagents for differential identification of the tissue(s) or cell type(s) present in a biological sample and for diagnosis of diseases and conditions which include, but are not limited to, diseases of the bone, haemopoietic system and cancer. Similarly, polypeptides and antibodies directed to these polypeptides are useful in providing immunological probes for differential identification of the tissue(s) or cell type(s). For a number of disorders of the above tissues or cells, particularly of the immune, haemopoietic and bone, expression of this gene at significantly higher or lower levels is routinely detected in certain tissues or cell types (e.g., immune, skeletal, cancerous and wounded tissues) or bodily fluids (e.g., serum, plasma, urine, synovial fluid and spinal fluid) or another tissue or cell sample taken from an individual having such a disorder, relative to the standard gene expression level, i.e., the expression level in healthy tissue or bodily fluid from an individual not having the disorder.

[0377] The tissue distribution in fetal liver, osteoclastoma and neutrophils indicates polynucleotides and polypeptides corresponding to this gene are useful for the treatment and diagnosis of diseases of the bone, haemopoietic and immune systems, as well as cancer. Furthermore, elevated levels of expression of this gene product in osteoclastoma indicates that it may play a role in the survival, proliferation, and/or growth of osteoclasts. Therefore, it is useful in influencing bone mass in such conditions as osteoporosis. More generally, as evidenced by expression in fetal liver/spleen, as well as the biological activity data, this gene may play a role in the survival, proliferation,-and/or differentiation of hematopoietic cells in general, and is of use in the augmentation of the numbers of stem cells and committed progenitors. Expression of this gene product in neutrophils also indicates that it may play a role in mediating responses to infection and controlling immunological responses, such as those that occur during immune surveillance. Protein, as well as, antibodies directed against the protein may show utility as a tumor marker and/or immunotherapy targets for the above listed tissues.

[0378] Many polynucleotide sequences, such as EST sequences, are publicly available and accessible through sequence databases. Some of these sequences are related to SEQ ID NO:49 and may have been publicly available prior to conception of the present invention. Preferably, such related polynucleotides are specifically excluded from the scope of the present invention. To list every related sequence is cumbersome. Accordingly, preferably excluded from the present invention are one or more polynucleotides comprising a nucleotide sequence described by the general formula of a−b, where a is any integer between 1 to 1131 of SEQ ID NO:49, b is an integer of 15 to 1145, where both a and b correspond to the positions of nucleotide residues shown in SEQ ID NO:49, and where b is greater than or equal to a+14.

[0379] Features of Protein Encoder by Gene No: 40

[0380] When tested against NIH3T3 cell lines, supernatants removed from cells containing this gene activated the EGR1 (early growth response gene 1) promoter element. Thus, it is likely that this gene activates fibroblast cells, or more generally, other cells of the integumentary system, through the EGR1 signal transduction pathway. EGR1 is a separate signal transduction pathway from Jak-STAT. Genes containing the EGR1 promoter are induced in various tissues and cell types upon activation, leading the cells to undergo differentiation and proliferation.

[0381] Preferred polypeptides of the invention comprise the following amino acid sequence: LPFTLKPKMVKIPFSSRLINNNLQYIDCILSLKRCEEILLMWHGLLLCLASVFLELRGDRPPLLASL LEPHKMPLHSSSL (SEQ ID NO:502), LKPKMVKIPFSSRLINNNLQYIDC (SEQ ID NO:503), SLKRCEEILLMWHGLLLCLASVF (SEQ ID NO:504), LRGDRPPLLASLLEPHKMPLH (SEQ ID NO:505), LQMHTGSGFKGKSCEVAFYVAQAEKPGEGAYLHGAQETQKQGIEADHATLRGSPHSVSKTKYNLYIANY YLLAWRK MES (SEQ ID NO:506), CEVAFYVAQAEKPGEGAYLH (SEQ ID NO:507), and/or ATLRGSPHSVSKTKYNLYIANYY (SEQ ID NO:508). Polynucleotides encoding these polypeptides are also provided.

[0382] This gene is expressed primarily in human ovarian cancer.

[0383] Therefore, polynucleotides and polypeptides of the invention are useful as reagents for differential identification of the tissue(s) or cell type(s) present in a biological sample and for diagnosis of diseases and conditions which include, but are not limited to, reproductive disorders, particularly cancers, such as ovarian cancer. Similarly, polypeptides and antibodies directed to these polypeptides are useful in providing immunological probes for differential identification of the tissue(s) or cell type(s). For a number of disorders of the above tissues or cells, particularly of the female reproductive system, expression of this gene at significantly higher or lower levels is routinely detected in certain tissues or cell types (e.g., reproductive, and cancerous and wounded tissues) or bodily fluids (e.g., lymph, serum, plasma, urine, synovial fluid and spinal fluid) or another tissue or cell sample taken from an individual having such a disorder, relative to the standard gene expression level, i.e., the expression level in healthy tissue or bodily fluid from an individual not having the disorder.

[0384] The tissue distribution in human ovarian cancer tissue indicates polynucleotides and polypeptides corresponding to this gene are useful for the diagnosis, treatment, and/or prevention of ovarian cancer. Moreover, the expression within cellular sources marked by proliferating cells indicates that this protein may play a role in the regulation of cellular division, and may show utility in the diagnosis and treatment of cancer and other proliferative disorders. Similarly, developmental tissues rely on decisions involving cell differentiation and/or apoptosis in pattern formation. Thus this protein may also be involved in apoptosis or tissue differentiation and could again be useful in cancer therapy. Furthermore, the protein may also be used to determine biological activity, to raise antibodies, as tissue markers, to isolate cognate ligands or receptors, to identify agents that modulate their interactions, in addition to its use as a nutritional supplement. Protein, as well as, antibodies directed against the protein may show utility as a tumor marker and/or immunotherapy targets for the above listed tissues.

[0385] Many polynucleotide sequences, such as EST sequences, are publicly available and accessible through sequence databases. Some of these sequences are related to SEQ ID NO:50 and may have been publicly available prior to conception of the present invention. Preferably, such related polynucleotides are specifically excluded from the scope of the present invention. To list every related sequence is cumbersome. Accordingly, preferably excluded from the present invention are one or more polynucleotides comprising a nucleotide sequence described by the general formula of a−b, where a is any integer between 1 to 668 of SEQ ID NO:50, b is an integer of 15 to 682, where both a and b correspond to the positions of nucleotide residues shown in SEQ ID NO:50, and where b is greater than or equal to a+14.

[0386] Features of Protein Encoder by Gene No: 41

[0387] Contact of cells with supernatant expressing the product of this gene increases the permeability of the plasma membrane of myeloid leukemia cells to calcium. Thus, it is likely that the product of this gene is involved in a signal transduction pathway that is initiated when the product binds a receptor on the surface of immune or hematopoietic cells, in addition to other cells or cell types. Thus, polynucleotides and polypeptides have uses which include, but are not limited to, activating myeloid cells. Binding of a ligand to a receptor is known to alter intracellular levels of small molecules, such as calcium, potassium and sodium, as well as alter pH and membrane potential. Alterations in small molecule concentration can be measured to identify supernatants which bind to receptors of a particular cell.

[0388] Preferred polypeptides of the invention comprise the following amino acid sequence: LSASLLDRYPASESNNYIFNFVLYMLHFLAGTLFSLFPDFELSPRSATLFPDLRTVQLLSSRPHL (SEQ ID NO:509), LLDRYPASESNNYIFNFVLYMLH (SEQ ID NO:510), FPDFELSPRSATLFPDLRTV (SEQ ID NO:511), NGGFYDVSFKQAGLIEFLCIIYFYPMAHVICGSRFTIVRTIPVHYVGEYFIKSSIWILYRINERTATKK AASDFQKNFRCFLDAF (SEQ ID NO:512), KQAGLIEFLCIIYFYPMAH (SEQ ID NO:513), and/or YFIKSSIWILYRINERTATKKAA (SEQ ID NO:514). Polynucleotides encoding these polypeptides are also provided.

[0389] This gene is expressed primarily in anergic T-cells.

[0390] Therefore, polynucleotides and polypeptides of the invention are useful as reagents for differential identification of the tissue(s) or cell type(s) present in a biological sample and for diagnosis of diseases and conditions which include, but are not limited to, immune or hematopoietic disorders, particularly immunodeficiencies and inflammatory disorders. Similarly, polypeptides and antibodies directed to these polypeptides are useful in providing immunological probes for differential identification of the tissue(s) or cell type(s). For a number of disorders of the above tissues or cells, particularly of the immune system, expression of this gene at significantly higher or lower levels is routinely detected in certain tissues or cell types (e.g., Immune, hematopoietic cancerous and wounded tissues) or bodily fluids (e.g., lymph, serum, plasma, urine, synovial fluid and spinal fluid) or another tissue or cell sample taken from an individual having such a disorder, relative to the standard gene expression level, i.e., the expression level in healthy tissue or bodily fluid from an individual not having the disorder.

[0391] The tissue distribution in anergic T-cells, combined with the detected calcium flux biological activity, indicates polynucleotides and polypeptides corresponding to this gene are useful for the diagnosis and treatment of immune disorders, particularly those involving anergic T-cells. Moreover, the secreted protein can also be used to determine biological activity, to raise antibodies, as tissue markers, to isolate cognate ligands or receptors, to identify agents that modulate their interactions, and as nutritional supplements. It may also have a very wide range of biological acitivities. Typical of these are cytokine, cell proliferation/differentiation modulating activity or induction of other cytokines; immunostimulating/immunosuppressant activities (e.g., for treating human immunodeficiency virus infection, cancer, autoimmune diseases and allergy); regulation of hematopoiesis (e.g., for treating anaemia or as adjunct to chemotherapy); stimulation or growth of bone, cartilage, tendons, ligaments and/or nerves (e.g., for treating wounds, stimulation of follicle stimulating hormone (e.g., for control of fertility); chemotactic and chemokinetic activities (e.g., for treating infections, tumors); hemostatic or thrombolytic activity (e.g., for treating haemophilia, cardiac infarction etc.); anti-inflammatory activity (e.g., for treating septic shock, Crohn's Disease); as antimicrobials; for treating psoriasis or other hyperproliferative diseases; for regulation of metabolism, and behaviour. Also contemplated is the use of the corresponding nucleic acid in gene therapy procedures. Protein, as well as, antibodies directed against the protein may show utility as a tumor marker and/or immunotherapy targets for the above listed tissues.

[0392] Many polynucleotide sequences, such as EST sequences, are publicly available and accessible through sequence databases. Some of these sequences are related to SEQ ID NO:51 and may have been publicly available prior to conception of the present invention. Preferably, such related polynucleotides are specifically excluded from the scope of the present invention. To list every related sequence is cumbersome. Accordingly. preferably excluded from the present invention are one or more polynucleotides comprising a nucleotide sequence described by the general formula of a−b, where a is any integer between 1 to 756 of SEQ ID NO:51, b is an integer of 15 to 770, where both a and b correspond to the positions of nucleotide residues shown in SEQ ID NO:51, and where b is greater than or equal to a+14.

[0393] Features of Protein Encoder by Gene No: 42

[0394] In a specific embodiment, polypeptides comprising the amino acid sequence of the open reading frame upstream of the predicted signal peptide are contemplated by the present invention. Specifically, polypeptides of the invention comprise the following amino acid sequence: SPRXGRXFXTSRKQISGFLEFDMGVLTRELFGVVGMLYILIVGMVTWLDAFVKTHLMVMQNEYILFYVN YTSKLNFFKKFLLKSKDICGASCKFYC (SEQ ID NO:515). Polynucleotides encoding these polypeptides are also provided.

[0395] This gene is expressed primarily in bone marrow.

[0396] Therefore, polynucleotides and polypeptides of the invention are useful as reagents for differential identification of the tissue(s) or cell type(s) present in a biological sample and for diagnosis of diseases and conditions which include, but are not limited to, immune or hematopoietic disorders, particularly leukemia or multiple myeloma. Similarly, polypeptides and antibodies directed to these polypeptides are useful in providing immunological probes for differential identification of the tissue(s) or cell type(s). For a number of disorders of the above tissues or cells, particularly of the immune system, expression of this gene at significantly higher or lower levels is routinely detected in certain tissues or cell types (e.g., immune, hematopoietic cancerous and wounded tissues) or bodily fluids (e.g., lymph, serum, plasma, urine, synovial fluid and spinal fluid) or another tissue or cell sample taken from an individual having such a disorder, relative to the standard gene expression level, i.e., the expression level in healthy tissue or bodily fluid from an individual not having the disorder.

[0397] The tissue distribution in bone marrow tissue indicates polynucleotides and polypeptides corresponding to this gene are useful for the diagnosis, treatment, and/or prevention of some types of leukemia, and other disorders involving bone marrow tissues or cells. Moreover, polynucleotides and polypeptides corresponding to this gene are useful for the treatment and diagnosis of hematopoietic related disorders such as anemia, pancytopenia, leukopenia, thrombocytopenia or leukemia since stromal cells are important in the production of cells of hematopoietic lineages. Representative uses are described in the “Immune Activity” and “Infectiou's Disease” sections below, in Example 11, 13, 14, 16, 18, 19, 20, and 27, and elsewhere herein. Briefly, the uses include bone marrow cell ex-vivo culture, bone marrow transplantation, bone marrow reconstitution, radiotherapy or chemotherapy of neoplasia.

[0398] The gene product may also be involved in lymphopoiesis, therefore, it can be used in immune disorders such as infection, inflammation, allergy, immunodeficiency etc. In addition, this gene product may have commercial utility in the expansion of stem cells and committed progenitors of various blood lineages, and in the differentiation and/or proliferation of various cell types. Furthermore, the protein may also be used to determine biological activity, to raise antibodies, as tissue markers, to isolate cognate ligands or receptors, to identify agents that modulate their interactions, in addition to its use as a nutritional supplement. Protein, as well as, antibodies directed against the protein may show utility as a tumor marker and/or immunotherapy targets for the above listed tissues.

[0399] Many polynucleotide sequences, such as EST sequences, are publicly available and accessible through sequence databases. Some of these sequences are related to SEQ ID NO:52 and may have been publicly available prior to conception of the present invention. Preferably, such related polynucleotides are specifically excluded from the scope of the present invention. To list every related sequence is cumbersome. Accordingly, preferably excluded from the present invention are one or more polynucleotides comprising a nucleotide sequence described by the general formula of a−b, where a is any integer between 1 to 551 of SEQ ID NO:52, b is an integer of 15 to 565, where both a and b correspond to the positions of nucleotide residues shown in SEQ ID NO:52, and where b is greater than or equal to a+14.

[0400] Features of Protein Encoder by Gene No: 43

[0401] Preferred polypeptides of the invention comprise the following amino acid sequence: [sequence omitted] (SEQ ID NO:516), IYRYLKIKSKLLIGSGKCQLQPEWLQTSL (SEQ ID NO:517), [sequence omitted] (SEQ ID NO:518), SKGPRKNGLSMCGSVYSTIWS (SEQ ID NO:519), and/or QSPNINTRHISKRGLNK (SEQ ID NO:520). Polynucleotides encoding these polypeptides are also provided.

[0402] This gene is expressed primarily in adult retina, and to a lesser extent, in 12 week old early stage human.

[0403] Therefore, polynucleotides and polypeptides of the invention are useful as reagents for differential identification of the tissue(s) or cell type(s) present in a biological sample and for diagnosis of diseases and conditions which include, but are not limited to, visual or developmental disorders, particularly retinopathy. Similarly, polypeptides and antibodies directed to these polypeptides are useful in providing immunological probes for differential identification of the tissue(s) or cell type(s). For a number of disorders of the above tissues or cells, particularly of the ocular system, expression of this gene at significantly higher or lower levels is routinely detected in certain tissues or cell types (e.g., visual, developmental cancerous and wounded tissues) or bodily fluids (e.g., lymph, serum, amniotic fluid, aqueous humor, vitreous humor, plasma, urine, synovial fluid and spinal fluid) or another tissue or cell sample taken from an individual having such a disorder, relative to the standard gene expression level, i.e., the expression level in healthy tissue or bodily fluid from an individual not having the disorder.

[0404] The tissue distribution in human retina indicates polynucleotides and polypeptides corresponding to this gene are useful for diagnosis, treatment and/or prevention of retinopathy, and other disorders involving the visual system, including congenital disorders such as, color blindness, macular degeneration and Tay-Sach's Disease. Moreover, the expression within embryonic tissue indicates that this protein may play a role in the regulation of cellular division, and may show utility in the diagnosis and treatment of cancer and other proliferative disorders. Similarly, developmental tissues rely on decisions involving cell differentiation and/or apoptosis in pattern formation. Thus this protein may also be involved in apoptosis tissue differentiation and could again be useful in cancer therapy. Furthermore, the protein may also be used to determine biological activity, to raise antibodies, as tissue markers, to isolate cognate ligands or receptors, to identify agents that modulate their interactions, in addition to its use as a nutritional supplement. Protein, as well as, antibodies directed against the protein may show utility as a tumor marker and/or immunotherapy targets for the above listed tissues.

[0405] Many polynucleotide sequences, such as EST sequences, are publicly available and accessible through sequence databases. Some of these sequences are related to SEQ ID NO:53 and may have been publicly available prior to conception of the present invention. Preferably, such related polynucleotides are specifically excluded from the scope of the present invention. To list every related sequence is cumbersome. Accordingly, preferably excluded from the present invention are one or more polynucleotides comprising a nucleotide sequence described by the general formula of a−b, where a is any integer between 1 to 1342 of SEQ ID NO:53, b is an integer of 15 to 1356, where both a and b correspond to the positions of nucleotide residues shown in SEQ ID NO:53, and where b is greater than or equal to a+14.

[0406] Features of Protein Encoder by Gene No: 44

[0407] The translation product of this gene has homology to the conserved human non-differentiated blood cell tyrosine kinase receptor fragment (See, e.g., GeneSeq Accession No. R76466; all references available through this accession are hereby incorporated by reference herein) which is thought to be important in signalling essential cellular pathways; and other receptor protein tyrosine kinases (See, e.g., Genbank Accession Nos. gi|1089898|emb|CAA88909.1|, gi|459173|gb|AAA18591.1|, and pir|A54092|A54092; all references available through these accessions are hereby incorporated by reference herein). Based on the sequence similarity, the translation product of this gene is expected to share at least some biological activities with receptor protein tyrosine kinase proteins. Such activities are known in the art, some of which are described elsewhere herein.

[0408] A preferred polypeptide fragment of the invention comprises the following amino acid sequence: MLGSPCLLWLLAVTFLVPRAQPLAPQDFEEEEADETETAWPPLPAVPCDYDHCRHLQVPCKELQRVGPA ACLCPGXSSPAQPPDPPRMGEVRIAAEEGRAVVHWCAPFSPVLHYWLLLWDGSEXRRRGPPLNATVRRA ELKGLKPGGIYVVCVVAANEAGASRVPQAGGEGLE (SEQ ID NO:525). Polynucleotides encoding these polypeptides are also provided.

[0409] Preferred polypeptides of the invention comprise the following amino acid sequence:HPQTSAGGFPLHQGLPTVS (SEQ ID NO:521), PSWFPELSPWPLKTLKKRRQMRLRRRGRLCRLSPATTTTADTCRCPARSYRGSGRRPACAQDSPAPPSR PTRRAWEKCALRPKRAAQWSTGVPPSPRSSTTGCCFGTAAXCAEGARR (SEQ ID NO:522), TTTADTCRCPARSYRGSGRRPA (SEQ ID NO:523, and/or PSRPTRRAWEKCALRPKRAAQWST (SEQ ID NO:524).

[0410] In another embodiment, polypeptides comprising the amino acid sequence of the open reading frame upstream of the predicted signal peptide are contemplated by the present invention. Specifically, polypeptides of the invention comprise the following amino acid sequence: HPQTSAGGFPLHQGLPTVSMLGSPCLLWLLAVTFLVPRAQPLAPQDFEEEEADETETAWPPLPAVPCDY DHCRHLQVPCKELQRVGPAACLCPGLSSPAQPPDPPRMGEVRIAAEEGRAVVHWCAPFSPVLHYWLLLW DGSEAAQKGPPLNATVRRAELKGLKPGGIYVVCVVAANEAGASRVPQAGGEGLEGADIPAFGPCSRLAV PPNPRTLVHAAVGVGTALALLSCAALVWHFCLRDRWGCPRRAAARAAGAL (SEQ ID NO:526). Polynucleotides encoding these polypeptides are also provided.

[0411] This gene is expressed primarily in human fetal epithelium.

[0412] Therefore, polynucleotides and polypeptides of the invention are useful as reagents for differential identification of the tissue(s) or cell type(s) present in a biological sample and for diagnosis of diseases and conditions which include, but are not limited to, developmental, integumentary, immune, or hematopoietic disorders, particularly skin cancer. Similarly, polypeptides and antibodies directed to these polypeptides are useful in providing immunological probes for differential identification of the tissue(s) or cell type(s). For a number of disorders of the above tissues or cells, particularly of the integumental system, expression of this gene at significantly higher or lower levels is routinely detected in certain tissues or cell types (e.g., developmental, integumentary, immune, hematopoietic, and cancerous and wounded tissues) or bodily fluids (e.g., lymph, serum, plasma, amniotic fluid, urine, synovial fluid and spinal fluid) or another tissue or cell sample taken from an individual having such a disorder, relative to the standard gene expression level, i.e., the expression level in healthy tissue or bodily fluid from an individual not having the disorder.

[0413] Preferred polypeptides of the present invention comprise immunogenic epitopes shown in SEQ ID NO: 178 as residues: Gln-26 to Ala-39, Cys-48 to His-55, Pro-79 to Arg-87, Ala-124 to Pro-130, Leu-220 to Gly-225. Polynucleotides encoding said polypeptides are also provided.

[0414] The tissue distribution in human fetal epithelium, combined with the homology to a conserved tyrosine kinase receptor, indicates polynucleotides and polypeptides corresponding to this gene are useful for the diagnosis, treatment, and/or prevention of skin cancer, or other disorders related to the integument, particularly proliferative conditions. Similarly, polynucleotides and polypeptides corresponding to this gene are useful for the treatment, diagnosis, and/or prevention of various skin disorders including congenital disorders (i.e., nevi, moles, freckles, Mongolian spots, hemangiomas, port-wine syndrome), integumentary tumors (i.e., keratoses, Bowen's Disease, basal cell carcinoma, squamous cell carcinoma, malignant melanoma, Paget's Disease, mycosis fungoides, and Kaposi's sarcoma), injuries and inflammation of the skin (i.e., wounds, rashes, prickly heat disorder, psoriasis, dermatitis), atherosclerosis, uticaria, eczema, photosensitivity, autoimmune disorders (i.e., lupus erythematosus, vitiligo, dermatomyositis, morphea, scleroderma, pemphigoid, and. pemphigus), keloids, striae, erythema, petechiae, purpura, and xanthelasma'. In addition, such disorders may predispose increased susceptibility to viral and bacterial infections of the skin (i.e., cold sores, warts, chickenpox, molluscum contagiosum, herpes zoster, boils, cellulitis, erysipelas, impetigo, tinea, althlete's foot, and ringworm).

[0415] Moreover, the protein product of this gene may also be useful for the treatment or diagnosis of various connective tissue disorders such as arthritis, trauma tendonitis, chrondomalacia and inflammation, autoimmune disorders such as rheumatoid arthritis, lupus, scleroderma, and dermatomyositis as well as dwarfism, spinal deformation, and specific joint abnormalities as well as chondrodysplasias (i.e., spondyloepiphyseal dysplasia congenita, familial osteoarthritis, Atelosteogenesis type II, metaphyseal chondrodysplasia type Schmid). Furthermore, the protein may also be used to determine biological activity, to raise antibodies, as tissue markers, to isolate cognate ligands or receptors, to identify agents that modulate their interactions, in addition to its use as a nutritional supplement. Protein, as well as, antibodies directed against the protein may show utility as a tumor marker and/or immunotherapy targets for the above listed tissues.

[0416] Many polynucleotide sequences, such as EST sequences, are publicly available and accessible through sequence databases. Some of these sequences are related to SEQ ID NO:54 and may have been publicly available prior to conception of the present invention. Preferably, such related polynucleotides are specifically excluded from the scope of the present invention. To list every related sequence is cumbersome. Accordingly, preferably excluded from the present invention are one or more polynucleotides comprising a nucleotide sequence described by the general formula of a−b, where a is any integer between 1 to 1154 of SEQ ID NO:54, b is an integer of 15 to 1168, where both a and b correspond to the positions of nucleotide residues shown in SEQ ID NO:54, and where b is greater than or equal to a+14.

[0417] Features of Protein Encoder by Gene No: 45

[0418] When tested against PC12 cell lines, supernatants removed from cells containing this gene activated the EGR1 (early growth response gene 1) pathway. Thus, it is likely that this gene activates sensory neuron cells, or generally other cells or cell types, particularly immune cells, through the EGR1 signal transduction pathway. EGR1 is a separate signal transduction pathway from Jak-STAT, genes containing the EGR1 promoter are induced in various tissues and cell types upon activation, leading the cells to undergo differentiation and proliferation.

[0419] Preferred polypeptides of the invention comprise the following amino acid sequence: IGQLVMKSICHFQRLLSVAIDFASQFLKNYIFSSTHSSKAGFSVVCSLPKWLYTDGMEMVLKITHKLSF (SEQ ID NO:527), and/or QRLLSVAIDFASQFLKNYIFSSTH (SEQ ID NO:528).

[0420] In another embodiment, polypeptides comprising the amino acid sequence of the open reading frame upstream of the predicted signal peptide are contemplated by the present invention. Specifically, polypeptides of the invention comprise the following amino acid sequence: ARGVLNLRNRFECFSIIETVMTIHALLVYACNSKCLWFSISHLHFCLVTLLILTNMTESSFSLKG (SEQ ID NO:529). Polynucleotides encoding these polypeptides are also provided.

[0421] The gene encoding the disclosed cDNA is believed to reside on chromosome 8. Accordingly, polynucleotides related to this invention are useful as a marker in linkage analysis for chromosome 8.

[0422] This gene is expressed primarily in fetal liver, and to a lesser extent, in resting T-cells.

[0423] Therefore, polynucleotides and polypeptides of the invention are useful as reagents for differential identification of the tissue(s) or cell type(s) present in a biological sample and for diagnosis of diseases and conditions which include, but are not limited to, immune, hematopoietic, or hepatic disorders. Similarly, polypeptides and antibodies directed to these polypeptides are useful in providing immunological probes for differential identification of the tissue(s) or cell type(s). For a number of disorders of the above tissues or cells, particularly of the immune system, expression of this gene at significantly higher or lower levels is routinely detected in certain tissues or cell types (e.g., immune, hematopoietic, hepatic, metabolic, and cancerous and wounded tissues) or bodily fluids (e.g., lymph, serum, amniotic fluid, plasma, urine, synovial fluid and spinal fluid) or another tissue or cell sample taken from an individual having such a disorder, relative to the standard gene expression level, i.e., the expression level in healthy tissue or bodily fluid from an individual not having the disorder.

[0424] The tissue distribution in fetal liver and resting T-cells, combined with the detected EGR1 biological activity indicates polynucleotides and polypeptides corresponding to this gene are useful for the diagnosis, treatment, and/or prevention of immune disorders involving T-cells, and more generally, hematopoietic conditions. Moreover, polynucleotides and polypeptides corresponding to this gene are useful for the treatment and diagnosis of hematopoetic related disorders such as anemia, pancytopenia, leukopenia, thrombocytopenia or leukemia since stromal cells are important in the production of cells of hematopoietic lineages. Representative uses are described in the “Immune Activity” and “Infectiou's Disease” sections below, in Example 11, 13, 14, 16, 18, 19, 20, and 27, and elsewhere herein. Briefly, the uses include bone marrow cell ex-vivo culture, bone marrow transplantation, bone marrow reconstitution, radiotherapy or chemotherapy of neoplasia.

[0425] The gene product may also be involved in lymphopoiesis, therefore, it can be used in immune disorders such as infection, inflammation, allergy, immunodeficiency, etc. In addition, this gene product may have commercial utility in the expansion of stem cells and committed progenitors of various blood lineages, and in the differentiation and/or proliferation of various cell types. Additionally, expression within fetal tissue indicates that this protein may play a role in the regulation of cellular division, and may show utility in the diagnosis and treatment of cancer and other proliferative disorders. Similarly, developmental tissues rely on decisions involving cell differentiation and/or apoptosis in pattern formation. Thus this protein may also be involved in apoptosis or tissue differentiation and could again be useful in cancer therapy. Furthermore, the protein may also be used to determine biological activity, to raise antibodies, as tissue markers, to isolate cognate ligands or receptors, to identify agents that modulate their interactions, in addition to its use as a nutritional supplement. Protein, as well as, antibodies directed against the protein may show utility as a tumor marker and/or immunotherapy targets for the above listed tissues.

[0426] Many polynucleotide sequences, such as EST sequences, are publicly available and accessible through sequence databases. Some of these sequences are related to SEQ ID NO:55 and may have been publicly available prior to conception of the present invention. Preferably, such related polynucleotides are specifically excluded from the scope of the present invention. To list every related sequence is cumbersome. Accordingly, preferably excluded from the present invention are one or more polynucleotides comprising a nucleotide sequence described by the general formula of a−b, where a is any integer between 1 to 634 of SEQ ID NO:55, b is an integer of 15 to 648, where both a and b correspond to the positions of nucleotide residues shown in SEQ ID NO:55, and where b is greater than or equal to a+14.

[0427] Features of Protein Encoder by Gene No: 46

[0428] In a specific embodiment, polypeptides comprising the amino acid sequence of the open reading frame upstream of the predicted signal peptide are contemplated by the present invention. Specifically, polypeptides of the invention comprise the following amino acid sequence: LMKTASRMLLLEMVYRAFLIIILRFILIFLFKLNYSKLCPEIPFGLKFFSFVCIKVQIKKTSRKRRPYL (SEQ ID NO:530). Polynucleotides encoding these polypeptides are also provided.

[0429] This gene is expressed primarily in CD34-positive T cells from cord blood, and to a lesser extent, in anergic T cells.

[0430] Therefore, polynucleotides and polypeptides of the invention are useful as reagents for differential identification of the tissue(s) or cell type(s) present in a biological sample and for diagnosis of diseases and conditions which include, but are not limited to, immune or hematopoietic disorders, particularly in immune system maturation and hematopoeitic development. Similarly, polypeptides and antibodies directed to these polypeptides are useful in providing immunological probes for differential identification of the tissue(s) or cell type(s). For a number of disorders of the above tissues or cells, particularly of the immune system, expression of this gene at significantly higher or lower levels is routinely detected in certain tissues or cell types (e.g., immune, hematopoietic, and cancerous and wounded tissues) or bodily fluids (e.g., lymph, serum, plasma, amniotic fluid, urine, synovial fluid and spinal fluid) or another tissue or cell sample taken from an individual having such a disorder, relative to the standard gene expression level, i.e., the expression level in healthy tissue or bodily fluid from an individual not having the disorder.

[0431] Preferred polypeptides of the present invention comprise immunogenic epitopes shown in SEQ ID NO: 180 as residues: Ile-46 to Tyr-56. Polynucleotides encoding said polypeptides are also provided.

[0432] The tissue distribution in CD34-positive T cells and anergic T cells indicates polynucleotides and polypeptides corresponding to this gene are useful for the diagnosis, treatment, and/or prevention of diseases involving hematopoeitc development and stem cell maturation, including protection of stem cells from chemotherapy, immunosuppression during transplant rejection, and neutropenia. Representative uses are described in the “Immune Activity” and “Infectiou's Disease” sections below, in Example 11, 13, 14, 16, 18, 19, 20, and 27, and elsewhere herein. Briefly, the expression of this gene product indicates a role in regulating the proliferation; survival; differentiation; and/or activation of hematopoietic cell lineages, including blood stem cells. Moreover, this gene product is involved in the regulation of cytokine production, antigen presentation, or other processes that may also suggest a usefulness in the treatment of cancer (e.g., by boosting immune responses).

[0433] Since the gene is expressed in cells of lymphoid origin, the natural gene product is involved in immune functions. Therefore it is also used as an agent for immunological disorders including arthritis, asthma, immunodeficiency diseases such as AIDS, leukemia, rheumatoid arthritis, granulomatou's Disease, inflammatory bowel disease, sepsis, acne, neutropenia, neutrophilia, psoriasis, hypersensitivities, such as T-cell mediated cytotoxicity, immune reactions to transplanted organs and tissues, such as host-versus-graft and graft-versus-host diseases, or autoimmunity disorders, such as autoimmune infertility, lense tissue injury, demyelination, systemic lupus erythematosis, drug induced hemolytic anemia, rheumatoid arthritis, Sjogren's Disease, scleroderma and tissues. In addition, this gene product may have commercial utility in the expansion of stem cells and committed progenitors of various blood lineages, and in the differentiation and/or proliferation of various cell types. Furthermore, the protein may also be used to determine biological activity, raise antibodies, as tissue markers, to isolate cognate ligands or receptors, to identify agents that modulate their interactions, in addition to its use as a nutritional supplement. Protein, as well as, antibodies directed against the protein may show utility as a tumor marker and/or immunotherapy targets for the above listed tissues.

[0434] Many polynucleotide sequences, such as EST sequences, are publicly available and accessible through sequence databases. Some of these sequences are related to SEQ ID NO:56 and may have been publicly available prior to conception of the present invention. Preferably, such related polynucleotides are specifically excluded from the scope of the present invention. To list every related sequence is cumbersome. Accordingly, preferably excluded from the present invention are one or more polynucleotides comprising a nucleotide sequence described by the general formula of a−b, where a is any integer between 1 to 1374 of SEQ ID NO:56, b is an integer of 15 to 1388, where both a and b correspond to the positions of nucleotide residues shown in SEQ ID NO:56, and where b is greater than or equal to a+14.

[0435] Features of Protein Encoder by Gene No: 47

[0436] Preferred polypeptides of the invention comprise the following amino acid sequence: MDDIKI (SEQ ID NO:531), NFCVSKNTFNRVKRPIKWVKIFANDISCKRLISRIHKEILPFNNKKQPDFKVKKSRK (SEQ ID NO:532), FNRVKRPIKWVKIFANDISCKRLISRIHKE (SEQ ID NO:533), ETQMANKYMKRCSTL (SEQ ID NO:534), VIRELQVKATRRCHYTPIKWSKSKTLISSNADEYVEPT RTLIHCWWKCKIVQPLCKTAW (SEQ ID NO:535), and/or ATRRCHYTPIKWSKSKTLISSN (SEQ ID NO:536). Polynucleotides encoding these polypeptides are also provided.

[0437] This gene is expressed primarily in duodenum, and to a lesser extent, in brain frontal cortex.

[0438] Therefore, polynucleotides and polypeptides of the invention are useful as reagents for differential identification of the tissue(s) or cell type(s) present in a biological sample and for diagnosis of diseases and conditions which include, but are not limited to, gastrointestinal, neural, or endocrine disorders. Similarly, polypeptides and antibodies directed to these polypeptides are useful in providing immunological probes for differential identification of the tissue(s) or cell type(s). For a number of disorders of the above tissues or cells, particularly of the endocrine system, expression of this gene at significantly higher or lower levels is routinely detected in certain tissues or cell types (e.g., gastrointestinal, neural, endocrine, and cancerous and wounded tissues) or bodily fluids (e.g., serum, plasma, urine, synovial fluid and spinal fluid) or another tissue or cell sample taken from an individual having such a disorder, relative to the standard gene expression level, i.e., the expression level in healthy tissue or bodily fluid from an individual not having the disorder.

[0439] The tissue distribution in colon indicates polynucleotides and polypeptides corresponding to this gene are useful for the diagnosis and treatment of some gastrointestinal disorders, particularly cancers. Moreover polynucleotides and polypeptides corresponding to this gene are useful for the detection/treatment of neurodegenerative disease states, behavioral disorders, or inflammatory conditions which include, but are not limited to Alzheimer's Disease, Parkinson's Disease, Huntington's Disease, Tourette Syndrome, meningitis, encephalitis, demyelinating diseases, peripheral neuropathies, neoplasia, trauma, congenital malformations, spinal cord injuries, ischemia and infarction, aneurysms, hemorrhages, schizophrenia, mania, dementia, paranoia, obsessive compulsive disorder, depression, panic disorder, learning disabilities, ALS, psychoses, autism, and altered behaviors, including disorders in feeding, sleep patterns, balance, and perception. In addition, elevated expression of this gene product in regions of the brain indicates that it plays a role in normal neural function.

[0440] Potentially, this gene product is involved in synapse formation, neurotransmission, learning, cognition, homeostasis, or neuronal differentiation or survival. Protein, as well as, antibodies directed against the protein may show utility as a tumor marker and/or immunotherapy targets for the above listed tissues.

[0441] Many polynucleotide sequences, such as EST sequences, are publicly available and accessible through sequence databases. Some of these sequences are related to SEQ ID NO:57 and may have been publicly available prior to conception of the present invention. Preferably, such related polynucleotides are specifically excluded from the scope of the present invention. To list every related sequence is cumbersome. Accordingly, preferably excluded from the present invention are one or more polynucleotides comprising a nucleotide sequence described by the general formula of a−b, where a is any integer between 1 to 1998 of SEQ ID NO:57, b is an integer of 15 to 2012, where both a and b correspond to the positions of nucleotide residues shown in SEQ ID NO:57, and where b is greater than or equal to a+14.

[0442] Features of Protein Encoder by Gene No: 48

[0443] This gene is expressed primarily in endometrial stromal cells.

[0444] Therefore, polynucleotides and polypeptides of the invention are useful as reagents for differential identification of the tissue(s) or cell type(s) present in a biological sample and for diagnosis of diseases and conditions which include, but are not limited to, female infertility. Similarly, polypeptides and antibodies directed to these polypeptides are useful in providing immunological probes for differential identification of the tissue(s) or cell type(s). For a number of disorders of the above tissues or cells, particularly of the reproductive system, expression of this gene at significantly higher or lower levels is routinely detected in certain tissues or cell types (e.g., reproductive, cancerous and wounded tissues) or bodily fluids (e.g., serum, plasma, urine, synovial fluid and spinal fluid) or another tissue or cell sample taken from an individual having such a disorder, relative to the standard gene expression level, i.e., the expression level in healthy tissue or bodily fluid from an individual not having the disorder.

[0445] Preferred polypeptides of the present invention comprise immunogenic epitopes shown in SEQ ID NO: 182 as residues: Gln-26 to Asn-51. Polynucleotides encoding said polypeptides are also provided.

[0446] The tissue distribution in endometrial cells indicates polynucleotides and polypeptides corresponding to this gene are useful for treating female infertility. The protein product is likely involved in preparation of the endometrium of implantation and could be administered either topically or orally. Alternatively, this gene could be transfected in gene-replacement treatments into the cells of the endometrium and the protein products could be produced. Similarly, these treatments could be performed during artificial insemination for the purpose of increasing the likelyhood of implantation and development of a healthy embryo. In both cases this gene or its gene product could be administered at later stages of pregnancy to promote heathy development of the endometrium. Protein, as well as, antibodies directed against the protein may show utility as a tissue-specific marker and/or immunotherapy target for the above listed tissues.

[0447] Many polynucleotide sequences, such as EST sequences, are publicly available and accessible through sequence databases. Some of these sequences are related to SEQ ID NO:58 and may have been publicly available prior to conception of the present invention. Preferably, such related polynucleotides are specifically excluded from the scope-of the present invention. To list every related sequence is cumbersome. Accordingly, preferably excluded from the present invention are one or more polynucleotides comprising a nucleotide sequence described by the general formula of a−b, where a is any integer between 1 to 2036 of SEQ ID NO:58, b is an integer of 15 to 2050, where both a and b correspond to the positions of nucleotide residues shown in SEQ ED NO:58, and where b is greater than or equal to a+14.

[0448] Features of Protein Encoder by Gene No: 49

[0449] The gene encoding the disclosed cDNA is thought to reside on chromosome 19. Accordingly, polynucleotides related to this invention are useful as a marker in linkage analysis for chromosome 19.

[0450] This gene is expressed primarily in tissues of the central nervous system (predominantly the cerebellum) and immune system (predominantly the tonsils). Nucleic acids of the invention are useful as reagents for differential identification of the tissue(s) or cell type(s) present in a biological sample and for diagnosis of diseases and conditions which include, but are not limited to, disorders of the immune system and CNS. Similarly, polypeptides and antibodies directed to these polypeptides are useful in providing immunological probes for differential identification of the tissue(s) or cell type(s). For a number of disorders of the above tissues or cells, particularly of the immune system and neurological system, expression of this gene at significantly higher or lower levels is routinely detected in certain tissues or cell types (e.g., immune, neurological, cancerous and wounded tissues) or bodily fluids (e.g., serum, plasma, urine, synovial fluid and spinal fluid) or another tissue or cell sample taken from an individual having such a disorder, relative to the standard gene expression level, i.e., the expression level in healthy tissue or bodily fluid from an individual not having the disorder.

[0451] Preferred polypeptides of the present invention comprise immunogenic epitopes shown in SEQ ID NO: 183 as residues: Pro-43 to Leu-49, Pro-61 to Gly-66, Ser-71 to Ser-83. Polynucleotides encoding said polypeptides are also provided.

[0452] The tissue distribution in the immune system indicates polynucleotides and polypeptides corresponding to this gene are useful for the diagnosis and treatment of a variety of immune system disorders. Expression of this gene product in tonsils indicates a role in the regulation of the proliferation; survival; differentiation; and/or activation of potentially all hematopoietic cell lineages, including blood stem cells. This gene product is involved in the regulation of cytokine production, antigen presentation, or other processes that may also suggest a usefulness in the treatment of cancer (e.g. by boosting immune responses).

[0453] Since the gene is expressed in cells of lymphoid origin, the gene or protein, as well as, antibodies directed against the protein may show utility as a tumor marker and/or immunotherapy targets for the above listed tissues. Therefore it is also used as an agent for immunological disorders including arthritis, asthma, immune deficiency diseases such as AIDS, leukemia, rheumatoid arthritis, inflammatory bowel disease, sepsis, acne, and psoriasis. In addition, this gene product may have commercial utility in the expansion of stem cells and committed progenitors of various blood lineages, and in the differentiation and/or proliferation of various cell types. Protein, as well as, antibodies directed against the protein may show utility as a tumor marker and/or immunotherapy targets for the above listed tissues.

[0454] Furthermore, the tissue distribution in the central nervous system indicates polynucleotides and polypeptides corresponding to this gene are useful for the detection/treatment of neurodegenerative disease states and behavioural disorders such as Alzheimer's Disease, Parkinson's Disease, Huntington's Disease, Tourette Syndrome, schizophrenia, mania, dementia, paranoia, obsessive compulsive disorder, panic disorder, learning disabilities, ALS, psychoses, autism, and altered behaviors, including disorders in feeding, sleep patterns, balance, and perception. In addition, the gene or gene product may also play a role in the treatment and/or detection of developmental disorders associated with the developing embryo, or sexually-linked disorders. Protein, as well as, antibodies directed against the protein may show utility as a tumor marker and/or immunotherapy targets for the above listed tissues.

[0455] Many polynucleotide sequences, such as EST sequences, are publicly available and accessible through sequence databases. Some of these sequences are related to SEQ ID NO:59 and may have been publicly available prior to conception of the present invention. Preferably, such related polynucleotides are specifically excluded from the scope of the present invention. To list every related sequence is cumbersome. Accordingly, preferably excluded from the present invention are one or more polynucleotides comprising a nucleotide sequence described by the general formula of a−b, where a is any integer between 1 to 1159 of SEQ ID NO:59, b is an integer of 15 to 1173, where both a and b correspond to the positions of nucleotide residues shown in SEQ ID NO:59, and where b is greater than or equal to a+14.

[0456] Features of Protein Encoder by Gene No: 50

[0457] This gene is expressed primarily in testes.

[0458] Therefore, polynucleotides and polypeptides of the invention are useful as reagents for differential identification of the tissue(s) or cell type(s) present in a biological sample and for diagnosis of diseases and conditions which include, but are not limited to, reproductive disorders and teste's Diseases. Similarly, polypeptides and antibodies directed to these polypeptides are useful in providing immunological probes for differential identification of the tissue(s) or cell type(s). For a number of disorders of the above tissues or cells, particularly of the testes, expression of this gene at significantly higher or lower levels is routinely detected in certain tissues or cell types (e.g., testes, cancerous and wounded tissues) or bodily fluids (e.g., serum, plasma, urine, synovial fluid and spinal fluid) or another tissue or cell sample taken from an individual having such a disorder, relative to the standard gene expression level, i.e., the expression level in healthy tissue or bodily fluid from an individual not having the disorder.

[0459] Preferred polypeptides of the present invention comprise immunogenic epitopes shown in SEQ ID NO: 184 as residues: Lys-28 to His-35, Asn-58 to Gly-64, Thr-80 to Asn-86, Pro-96 to Glu-111, Pro-124 to Phe-133. Polynucleotides encoding said polypeptides are also provided.

[0460] The tissue distribution indicates polynucleotides and polypeptides corresponding to this gene are useful for the diagnosis and treatment of testes disorders. Furthermore, the tissue distribution in testes indicates that polynucleotides and polypeptides corresponding to this gene are useful for the treatment and diagnosis of conditions concerning proper, testicular function (e.g. endocrine function, sperm maturation), as well as cancer. Therefore, this gene product is useful in the treatment of male infertility and/or impotence. This gene product is also useful in assays designed to identify binding agents, as such agents (antagonists) are useful as male contraceptive agents. Similarly, the protein is believed to be useful in the treatment and/or diagnosis of testicular cancer. The testes are also a site of active gene expression of transcripts that is expressed, particularly at low levels, in other tissues of the body. Therefore, this gene product is expressed in other specific tissues or organs where it may play related functional roles in other processes, such as hematopoiesis, inflammation, bone formation, and kidney function, to name a few possible target indications. Protein, as well as, antibodies directed against the protein may show utility as a tissue-specific marker and/or immunotherapy target for the above listed tissues.

[0461] Many polynucleotide sequences, such as EST sequences, are publicly available and accessible through sequence databases. Some of these sequences are related to SEQ ID NO:60 and may have been publicly available prior to conception of the present invention. Preferably, such related polynucleotides are specifically excluded from the scope of the present invention. To list every related sequence is cumbersome. Accordingly, preferably excluded from the present invention are one or more polynucleotides comprising a nucleotide sequence described by the general formula of a−b, where a is any integer between 1 to 808 of SEQ ID NO:60, b is an integer of 15 to 822, where both a and b correspond to the positions of nucleotide residues shown in SEQ ID NO:60, and where b is greater than or equal to a+14.

[0462] Features of Protein Encoder by Gene No: 51

[0463] This gene is expressed primarily in infant brain, bone marrow and activated T-cells.

[0464] Therefore, polynucleotides and polypeptides of the invention are useful as reagents for differential identification of the tissue(s) or cell type(s) present in a biological sample and for diagnosis of diseases and conditions which include, but are not limited to, developmental, immune and hematopoetic disorders. Similarly, polypeptides and antibodies directed to these polypeptides are useful in providing immunological probes for differential identification of the tissue(s) or cell type(s). For a number of disorders of the above tissues or cells, particularly of the immune, hematopoetic and developmental systems, expression of this gene at significantly higher or lower levels is routinely detected in certain tissues or cell types (e.g., immune, developmental, cancerous and wounded tissues) or bodily fluids (e.g., serum, plasma, urine, synovial fluid and spinal fluid) or another tissue or cell sample taken from an individual having such a disorder, relative to the standard gene expression level, i.e., the expression level in healthy tissue or bodily fluid from an individual not having the disorder.

[0465] Preferred polypeptides of the present invention comprise immunogenic epitopes shown in SEQ ID NO: 185 as residues: Asn-23 to Val-37. Polynucleotides encoding said polypeptides are also provided.

[0466] Expression in infant brain indicates polynucleotides and polypeptides corresponding to this gene are useful for the detection/treatment of mental retardation and other developmental disorders in addition to neurodegenerative disease states and behavioural disorders such as Alzheimer's Disease, Parkinson's Disease, Huntington's Disease, schizophrenia, mania, dementia, paranoia, obsessive compulsive disorder and panic disorder. Expression of the gene in bone marrow and in B-cells indicates a role in the treatment and/or detection of immune disorders such as arthritis, asthma, immunodeficiency diseases and leukemia. Protein, as well as, antibodies directed against the protein may show utility as a tumor marker and/or immunotherapy targets for the above listed tissues.

[0467] Many polynucleotide sequences, such as EST sequences, are publicly available and accessible through sequence databases. Some of these sequences are related to SEQ ID NO:61 and may have been publicly available prior to conception of the present invention. Preferably, such related polynucleotides are specifically excluded from the scope of the present invention. To list every related sequence is cumbersome. Accordingly, preferably excluded from the present invention are one or more polynucleotides comprising a nucleotide sequence described by the general formula of a−b, where a is any integer between 1 to 1063 of SEQ ID NO:61, b is an integer of 15 to 1077, where both a and b correspond to the positions of nucleotide residues shown in SEQ ID NO:61, and where b is greater than or equal to a+14.

[0468] Features of Protein Encoder by Gene No: 52

[0469] The gene encoding the disclosed cDNA is thought to reside on chromosome 1. Accordingly, polynucleotides related to this invention are useful as a marker in linkage analysis for chromosome 1.

[0470] Preferred polypeptides of the invention comprise the following amino acid sequence: SCGSSRRSAKRSLTLKLIDFSHRI (SEQ ID NO:618). Polynucleotides encoding these polypeptides are also provided.

[0471] This gene is expressed primarily in infant brain, fetal liver and fetal spleen, and to a lesser extent in macrophages, T-cells, erythroid cells and myeloid progenitor cells.

[0472] Therefore, polynucleotides and polypeptides of the invention are useful as reagents for differential identification of the tissue(s) or cell type(s) present in a biological sample and for diagnosis of diseases and conditions which include, but are not limited to, neurological, developmental and immune disorders. Similarly, polypeptides and antibodies directed to these polypeptides are useful in providing immunological probes for differential identification of the tissue(s) or cell type(s). For a number of disorders of the above tissues or cells, particularly of the nervous, immune and developmental systems, expression of this gene at significantly higher or lower levels is routinely detected in certain tissues or cell types (e.g., immune, neurological, developing, cancerous and wounded tissues) or bodily fluids (e.g., serum, plasma, urine, synovial fluid and spinal fluid) or another tissue or cell sample taken from an individual having such a disorder, relative to the standard gene expression level, i.e., the expression level in healthy tissue or bodily fluid from an individual not having the disorder.

[0473] Preferred polypeptides of the present invention comprise immunogenic epitopes shown in SEQ ID NO: 186 as residues: Val-34 to Leu-48, Val-51L to Gly-67, Lys-74 to Asp-81, Thr-93 to Glu-98, Ser-138 to His-149, Ala-186 to Gln-201, Pro-257 to Arg-271. Polynucleotides encoding said polypeptides are also provided.

[0474] Expression in infant brain indicates polynucleotides and polypeptides corresponding to,this gene are useful for the detection/treatment of mental retardation and other developmental disorders in addition to neurodegenerative disease states and behavioural disorders such as Alzheimer's Disease, Parkinson's Disease, Huntington's Disease, schizophrenia, mania, dementia, paranoia, obsessive compulsive disorder and panic disorder. Its distribution in fetal liver and fetal spleen indicates that this gene may play a role in the development of the hematopoetic and immune systems and that it may play a role in the treatment/detection of immune system disorders such as leukemia, arthritis and asthma. Protein, as well as, antibodies directed against the protein may show utility as a tissue-specific marker and/or immunotherapy target for the above listed tissues.

[0475] Many polynucleotide sequences, such as EST sequences, are publicly available and accessible through sequence databases. Some of these sequences are related to SEQ ID NO:62 and may have been publicly available prior to conception of the present invention. Preferably, such related polynucleotides are specifically excluded from the scope of the present invention. To list every related sequence is cumbersome. Accordingly, preferably excluded from the present invention are one or more polynucleotides comprising a nucleotide sequence described by the general formula of a−b, where a is any integer between 1 to 2078 of SEQ ID NO:62, b is an integer of 15 to 2092, where both a and b correspond to the positions of nucleotide residues shown in SEQ ID NO:62, and where b is greater than or equal to a+14.

[0476] Features of Protein Encoder by Gene No: 53

[0477] When tested against U937 and Jurket cell lines, supernatants removed from cells containing this gene activated the GAS (gamma activating sequence) pathway. Thus, it is likely that this gene activates myeloid and T-cells, or more generally cells of immune or hematopoietic origin, through the JAK-STAT signal transduction pathway. GAS is a promoter element found upstream of many genes which are involved in the Jak-STAT pathway. The Jak-STAT pathway is a large, signal transduction pathway involved in the differentiation and proliferation of cells. Therefore, activation of the Jak-STAT pathway, reflected by the binding of the GAS element, can be used to indicate proteins involved in the proliferation and differentiation of cells.

[0478] Preferred polypeptides of the invention comprise the following amino acid sequence: ATXWDXPGCRNSARGERLHVGDAPW (SEQ ID NO:538), ARDERREVLKTLMRLSTQRPQAFLPSQSWFVRLQKAGEGALKQENSLTIQNCLLCLPRVHRQRPTPPQP QRGNTEASVLQTSTEHLPRAAVLLVPNSCSPGXPTXLLSS (SEQ ID NO:539), ERREVLKTLMRLSTQRPQAFLP (SEQ ID NO:540), GALKQEN SLTIQNCLLCLPRVHRQR (SEQ ID NO:541), and/or SVLQTSTEHLPRAAVLLVPNS (SEQ ID NO:542).

[0479] In another embodiment, polypeptides comprising the amino acid sequence of the open reading frame upstream of the predicted signal peptide are contemplated by the present invention. Specifically, polypeptides of the invention comprise the following amino acid sequence: ATXWDXPGCRNSARGERLHVGDAPWMFVERWLPCFLVVAVVVWVFACGPVEDKEDSFGWSSYFLASG LPPLLFEASQTRTVRAGRLGVFVC (SEQ ID NO:543). Polynucleotides encoding these polypeptides are also provided.

[0480] This gene is expressed primarily in activated human neutrophils.

[0481] Therefore, polynucleotides and polypeptides of the invention are useful as reagents for differential identification of the tissue(s) or cell type(s) present in a biological sample and for diagnosis of diseases and conditions which include, but are not limited to, immune or hematopoietic disorders, such as neutropenia. Similarly, polypeptides and antibodies directed to these polypeptides are useful in providing immunological probes for differential identification of the tissue(s) or cell type(s). For a number of disorders of the above tissues or cells, particularly of the immune system, expression of this gene at significantly higher or lower levels is routinely detected in certain tissues or cell types (e.g., immune, hematopoietic cancerous and wounded tissues) or bodily fluids (e.g., lymph, serum, plasma, urine, synovial fluid and spinal fluid) or another tissue or cell sample taken from an individual having such a disorder, relative to the standard gene expression level, i.e., the expression level in healthy tissue or bodily fluid from an individual not having the disorder.

[0482] Preferred polypeptides of the present invention comprise immunogenic epitopes shown in SEQ ID NO: 187 as residues: Val-25 to Gly-33. Polynucleotides encoding said polypeptides are also provided.

[0483] The tissue distribution in activated neutrophils, combined with the detected GAS biological activity, indicates polynucleotides and polypeptides corresponding to this gene are useful for the diagnosis, treatment, and/or prevention of immune disorders involving neutrophils. Representative uses are described in the “Immune Activity” and “Infectiou's Disease” sections below, in Example 11, 13, 14, 16, 18, 19, 20, and 27, and elsewhere herein. Briefly, the expression of this gene product indicates a role in regulating the proliferation; survival; differentiation; and/or activation of hematopoietic cell lineages, including blood stem cells. Moreover, this gene product is involved in the regulation of cytokine production, antigen presentation, or other processes that may also suggest a usefulness in the treatment of cancer (e.g., by boosting immune responses).

[0484] Since the gene is expressed in cells of lymphoid origin, the natural gene product is involved in immune functions. Therefore it is also used as an agent for immunological disorders including arthritis, asthma, immunodeficiency diseases such as AIDS, leukemia, rheumatoid arthritis, granulomatou's Disease, inflammatory bowel disease, sepsis, acne, neutropenia, neutrophilia, psoriasis, hypersensitivities, such as T-cell mediated cytotoxicity; immune reactions to transplanted organs and tissues, such as host-versus-graft and graft-versus-host diseases, or autoimmunity disorders, such as autoimmune infertility, lense tissue injury, demyelination, systemic lupus erythematosis, drug induced hemolytic anemia, rheumatoid arthritis, Sjogren's Disease, scleroderma and tissues. In addition, this gene product may have commercial utility in the expansion of stem cells and committed progenitors of various blood lineages, and in the differentiation and/or proliferation of various cell types.Furthermore, the protein may also be used to determine biological activity, raise antibodies, as tissue markers, to isolate cognate ligands or receptors, to identify agents that modulate their interactions, in addition to its use as a nutritional supplement. Protein, as well as, antibodies directed against the protein may show utility as a tumor marker and/or immunotherapy targets for the above listed tissues.

[0485] Many polynucleotide sequences, such as EST sequences, are publicly available and accessible through sequence databases. Some of these sequences are related to SEQ ID NO:63 and may have been publicly available prior to conception of the present invention. Preferably, such related polynucleotides are specifically excluded from the scope of the present invention. To list every related sequence is cumbersome Accordingly, preferably excluded from the present invention are one or more polynucleotides comprising a nucleotide sequence described by the general formula of a−b, where a is any integer between 1 to 602 of SEQ ID NO:63, b is an integer of 15 to 616, where both a and b correspond to the positions of nucleotide residues shown in SEQ ID NO:63, and where b is greater than or equal to a+14.

[0486] Features of Protein Encoder by Gene No: 54

[0487] Preferred polypeptides of the invention comprise the following amino acid sequence: [sequence omitted] (SEQ ID NO:545), KFCISGHQKYDSHGRETRFEMHKARAS (SEQ ID NO:546), HTLLEIANPLQAAVLGASSIHPSIHTSTHLMFMGLKWTELHHSPDSVQGAGAAEAAQTRHSLRPGR GRERHDCTLKNLTLFIIC (SEQ ID NO:547), NPLQAAVLGASSIHPSIHTSTH (SEQ ID NO:548), and/or SLRPGRGRERHDCTLKN (SEQ ID NO:549). Polynucleotides encoding these polypeptides are also provided.

[0488] This gene is expressed primarily in neutrophils.

[0489] Therefore, polynucleotides and polypeptides of the invention are useful as reagents for differential identification of the tissue(s) or cell type(s) present in a biological sample and for diagnosis of diseases and conditions which include, but are not limited to, immune or hematopoietic disorders, such as neutropenia, inflammatory, or allergic conditions. Similarly, polypeptides and antibodies directed to these polypeptides are useful in providing immunological probes for differential identification of the tissue(s) or cell type(s). For a number of disorders of the above tissues or cells, particularly of the immune system, expression of this gene at significantly higher or lower levels is routinely detected in certain tissues or cell types (e.g., immune, hematopoietic, and cancerous and wounded tissues) or bodily fluids (e.g., lymph, serum, plasma, urine, synovial fluid and spinal fluid) or another tissue or cell sample taken from an individual having such a disorder, relative to the standard gene expression level, i.e., the expression level in healthy tissue or bodily fluid from an individual not having the disorder.

[0490] The tissue distribution in neutrophils indicates polynucleotides and polypeptides corresponding to this gene are useful for the diagnosis, treatment, and/or prevention of immune disorders involving neutrophils, or more generally, Immune or hematopoietic disorders. Representative uses are described in the “Immune Activity” and “Infectiou's Disease” sections below, in Example 11, 13, 14, 16, 18, 19, 20, and 27, and elsewhere herein. Briefly, the expression of this gene product indicates a role in regulating the proliferation; survival; differentiation; and/or activation of hematopoietic cell lineages, including blood stem cells. This gene product is involved in the regulation of cytokine production, antigen presentation, or other processes that may also suggest a usefulness in the treatment of cancer (e.g., by boosting immune responses).

[0491] Since the gene is expressed in cells of lymphoid origin, the natural gene product is involved in immune functions. Therefore it is also used as an agent for immunological disorders including arthritis, asthma, immunodeficiency diseases such as AIDS, leukemia, rheumatoid arthritis, granulomatou's Disease, inflammatory bowel disease, sepsis, acne, neutropenia, neutrophilia, psoriasis, hypersensitivities, such as T-cell mediated cytotoxicity, immune reactions to transplanted organs and tissues, such as host-versus-graft and graft-versus-host diseases, or autoimmunity disorders, such as autoimmune infertility, lense tissue injury, demyelination, systemic lupus erythematosis, drug induced hemolytic anemia, rheumatoid arthritis, Sjogren's Disease, scleroderma and tissues. In addition, this gene product may have commercial utility in the expansion of stem cells and committed progenitors of various blood lineages, and in the differentiation and/or proliferation of various cell types. Furthermore, the protein may also be used to determine biological activity, raise antibodies, as tissue markers, to isolate cognate ligands or receptors, to identify agents that modulate their interactions, in addition to its use as a nutritional supplement. Protein, as well as, antibodies directed against the protein may show utility as a tumor marker and/or immunotherapy targets for the above listed tissues.

[0492] Many polynucleotide sequences, such as EST sequences, are publicly available and accessible through sequence databases. Some of these sequences are related to SEQ ID NO:64 and may have been publicly available prior to conception of the present invention. Preferably, such related polynucleotides are specifically excluded from the scope of the present invention. To list every related'sequence is cumbersome. Accordingly, preferably excluded from the present invention are one or more polynucleotides comprising a nucleotide sequence described by the general formula of a−b, where a is any integer between 1 to 814 of SEQ ID NO:64, b is an integer of 15 to 828, where both a and b correspond to the positions of nucleotide residues shown in SEQ ID NO:64, and where b is greater than or equal to a+14.

[0493] Features of Protein Encoder by Gene No: 55

[0494] Preferred polypeptides of the invention comprise the following amino acid sequence: DVPCFHFTFCHDCKFPEASPASHVEL (SEQ ID NO:550). Polynucleotides encoding these polypeptides are also provided.

[0495] This gene is expressed primarily in 7 week old early stage human.

[0496] Therefore, polynucleotides and polypeptides of the invention are useful as reagents for differential identification of the tissue(s) or cell type(s) present in a biological sample and for diagnosis of diseases and conditions which include, but are not limited to, fetal or developmental abnormalities, particularly congenital defects, including metabolic conditions. Similarly, polypeptides and antibodies directed to these polypeptides are useful in providing immunological probes for differential identification of the tissue(s) or cell type(s). For a number of disorders of the above. tissues or cells, particularly of the developmental systems, expression of this gene at significantly higher or lower levels is routinely detected in certain tissues or cell types (e.g., developmental, and can6erous and wounded tissues) or bodily fluids (e.g., lymph, serum, plasma, amniotic fluid, urine, synovial fluid and spinal fluid) or another tissue or cell sample taken from an individual having such a disorder, relative to the standard gene expression level, i.e., the expression level in healthy tissue or bodily fluid from an individual not having the disorder.

[0497] The tissue distribution in 7 week old early stage human tissue indicates polynucleotides and polypeptides corresponding to this gene are useful for the diagnosis, treatment, and/or prevention of fetal abnormalities. Expression within embryonic tissue indicates that this protein may play a role in the regulation of cellular division, and may show utility in the diagnosis and treatment of cancer and other proliferative disorders. Similarly, developmental tissues rely on decisions involving cell differentiation and/or apoptosis in pattern formation. Thus this protein may also be involved in apoptosis or tissue differentiation and could again be useful in cancer therapy. Futhermore, the protein is useful in the diagnosis, prevention, and/or treatment of various metabolic disorders such as Tay-Sach's Disease, phenylkenonuria, galactosemia, hyperlipiderias, porphyrias, leukemias, or Hurler's syndrome. Furthermore, the protein may also be used to determine biological activity, raise antibodies, as tissue markers, to isolate cognate ligands or receptors, to identify agents that modulate their interactions, in addition to its use as a nutritional supplement. Protein, as well as, antibodies directed, against the protein may show utility as a tumor marker and/or immunotherapy targets for the above listed tissues.

[0498] Many polynucleotide sequences, such as EST sequences, are publicly available and accessible through sequence databases. Some of these sequences are related to SEQ ID NO:65 and may have been publicly available prior to conception of the present invention. Preferably, such related polynucleotides are specifically excluded from the scope of the present invention. To list every related sequence is cumbersome. Accordingly, preferably excluded from the present invention are one or more polynucleotides comprising a nucleotide sequence described by the general formula of a−b, where a is any integer between 1 to 567 of SEQ ID NO:65, b is an integer of 15 to 581, where both a and b correspond to the positions of nucleotide residues shown in SEQ ID NO:65, and where b is greater than or equal to a+14.

[0499] Features of Protein Encoder by Gene No: 56

[0500] Preferred polypeptides of the invention comprise the following amino acid sequence: AENVHCTPAWETGRDSEDGKGREGMGRDRKGWDGTGLDGTGWEGKRERNVPA (SEQ ID NO:378), GRDSEDGKGREGMGRDRKGWDGTGLD (SEQ ID NO:379), TSLGDLWDYNNSSH (SEQ ID NO:380), DRRIIRTREAAVAVSRERPLHSSLGNRERLRRWEGTGRDGKGQEGMGRDGTG WDGMGREERKKCPS (SEQ ID NO:381), RPLHSSLGNRERLRRWEGTGRDGKG (SEQ ID NO:382), NQSWGPMGL (SEQ ID NO:383), GGGGCSEPRTSIALQPGKQGETPKMGRDGKGWE GTGRDGTGRDWMGRDGKGREKEMSQQ (SEQ ID NO:384), KQGETPKMGRDGKGWEGTGRDGTG (SEQ ID NO:385), and/or PVLGTYGTITTPVTELTKGQEKEGGVETVLYE (SEQ ID NO:386). Polynucleotides encoding these polypeptides are also provided.

[0501] This gene is expressed primarily in frontal cortex from a patient suffering from schizophrenia.

[0502] Therefore, polynucleotides and polypeptides of the invention are useful as reagents for differential identification of the tissue(s) or cell type(s) present in a biological sample and for diagnosis of diseases and conditions which include, but are not limited to, neural disorders, such as Schizophrenia. Similarly, polypeptides and antibodies directed to these polypeptides are useful in providing immunological probes for differential identification of the tissue(s) or cell type(s). For a number of disorders of the above tissues or cells, particularly of the central nervous system, expression of this gene at significantly higher or lower levels is routinely detected in certain tissues or cell types (e.g., neural, and cancerous and wounded tissues) or bodily fluids (e.g., lymph, serum, plasma, urine, synovial fluid and spinal fluid) or another tissue or cell sample taken from an individual having such a disorder, relative to the standard gene expression level, i.e., the expression level in healthy tissue or bodily fluid from an individual not having the disorder.

[0503] The tissue distribution in frontal cortex tissue indicates that polynucleotides and polypeptides corresponding to this gene are useful for the diagnosis, treatment, and/or prevention of some central nervous system disorders, for example, schizophrenia. Moreover, polynucleotides and polypeptides corresponding to this gene are useful for the detection/treatment of neurodegenerative disease states, behavioural disorders, or inflamatory conditions. Representative uses are described in the “Regeneration” and “Hyperproliferative Disorders” sections below, in Example 11, 15, and 18, and elsewhere herein. Briefly, the uses include, but are not limited to the detection, treatment, and/or prevention of Alzheimer's Disease, Parkinson's Disease, Huntington's Disease, Tourette Syndrome, meningitis, encephalitis, demyelinating diseases, peripheral neuropathies, neoplasia, trauma, congenital malformations, spinal cord injuries, ischemia and infarction, aneurysms, hemorrhages, schizophrenia, mania, dementia, paranoia, obsessive compulsive disorder, panic disorder, learning disabilities, ALS, psychoses, autism, and altered behaviors, including disorders in feeding, sleep patterns, balance, and perception. In addition, elevated expression of this gene product in regions of the brain indicates that it plays a role in normal neural function.

[0504] Potentially, this gene product is involved in synapse formation, neurotransmission, learning, cognition, homeostasis, or neuronal differentiation or survival. Moreover, the gene or gene product may also play a role in the treatment and/or detection of developmental disorders associated with the developing embryo, sexually-linked disorders, or disorders of the cardiovascular system. Furthermore, the protein may also be used to determine biological activity, to raise antibodies, as tissue markers, to isolate cognate ligands or receptors, to identify agents that. modulate their interactions, in addition to its use as a nutritional supplement. Protein, as well as, antibodies directed against the protein may show utility as a tumor marker and/or immunotherapy targets for the above listed tissues.

[0505] Many polynucleotide sequences, such as EST sequences, are publicly available and accessible through sequence databases. Some of these sequences are related to SEQ ID NO:66 and may have been publicly available prior to conception of the present invention. Preferably, such related polynucleotides are specifically excluded from the scope of the present invention. To list every related sequence is cumbersome. Accordingly, preferably excluded from the present invention are one or more polynucleotides comprising a nucleotide sequence described by the general formula of a−b, where a is any integer between 1 to 775 of SEQ ID NO:66, b is an integer of 15 to 789, where both a and b correspond to the positions of nucleotide residues shown in SEQ ID NO:66, and where b is greater than or equal to a+14.

[0506] Features of Protein Encoder by Gene No: 57

[0507] Preferred polypeptides of the invention comprise the following amino acid sequence: KIVFIDQKWSK (SEQ ID NO:560), CSLFWGILFLSRLRIHLFLSLKPCMCLRPIDILSHFLDIFVTSVLSELEKSSLKTTETFSFAVFLLLMM N (SEQ ID NO:561), LSRLRIHLFLSLKPCMCLRPIDILSH (SEQ ID NO:562), and/or VLSELEKSSLKTTETFSFAVFL (SEQ ID NO:563).

[0508] In another embodiment, polypeptides comprising the amino acid sequence of the open reading frame upstream of the predicted signal peptide are contemplated by the present invention. Specifically, polypeptides of the invention comprise the following amino acid sequence: KIVFIDQKWSKMSNFISITCLVFTILGHLVSLQVAHSSVFEFKTLYVLKTNRYSQSLFRHFCHLSFIRT RKIFLKNN (SEQ ID NO:564). Polynucleotides encoding these polypeptides are also provided.

[0509] This gene is expressed primarily in thymus and neutrophils.

[0510] Therefore, polynucleotides and polypeptides of the invention are useful as reagents for differential identification of the tissue(s) or cell type(s) present in a biological sample and for diagnosis of diseases and conditions which include, but are not limited to, immune or hematopoietic disorders, particularly inflammation, or disorders related to immune cell maturation and/or activation. Similarly, polypeptides and antibodies directed to these polypeptides are useful in providing immunological probes for differential identification of the tissue(s) or cell type(s). For a number of disorders of the above tissues or cells, particularly of the immune system, expression of this gene at significantly higher or lower levels is routinely detected in certain tissues or cell types (e.g., immune, hematopoietic, and cancerous and wounded tissues) or bodily fluids (e.g., lymph, serum, plasma, urine, synovial fluid and spinal fluid) or another tissue or cell sample taken from an individual having such a disorder, relative to the standard gene expression level, i.e., the expression level in healthy tissue or bodily fluid from an individual not having the disorder.

[0511] Preferred polypeptides of the present invention comprise immunogenic epitopes shown in SEQ ID NO: 191 as residues: Lys-38 to Leu-46. Polynucleotides encoding said polypeptides are also provided.

[0512] The tissue distribution in thymus and neutrophils indicates that polynucleotides and polypeptides corresponding to this gene are useful for the diagnosis, treatment, and/or prevention of inflammatory disorders, such as psoriasis, inflammatory bowel disease, rheumatoid arthritis, and sepsis. Representative uses are described in the “Immune Activity” and “Infectiou's Disease” sections below, in Example 11, 13, 14, 16, 18, 19, 20, and 27, and elsewhere herein. Briefly, the expression of this gene product in thymus and neutrophils indicates a role in regulating the proliferation; survival; differentiation; and/or activation of hematopoietic cell lineages, including blood stem cells. This gene product is involved in the regulation of cytokine production, antigen presentation, or other processes that may also suggest a usefulness in the treatment of cancer (e.g., by boosting immune responses).

[0513] Since the gene is expressed in cells of lymphoid origin, the natural gene product is involved in immune functions. Therefore it is also used as an agent for immunological disorders including arthritis; asthma, immunodeficiency diseases such as AIDS, leukemia, rheumatoid arthritis, granulomatou's Disease, inflammatory bowel disease, sepsis, acne, neutropenia, neutrophilia, psoriasis, hypersensitivities, such as T-cell mediated cytotoxicity, immune reactions to transplanted organs and tissues, such as host-versus-graft and graft-versus-host diseases, or autoimmunity disorders, such as autoimmune infertility, lense tissue injury, demyelination, systemic lupus erythematosis, drug induced hemolytic anemia, rheumatoid arthritis, Sjogren's Disease, scleroderma and tissues. In addition,,this gene product may have commercial utility in the expansion of stem cells and committed progenitors of various blood lineages, and in the differentiation and/or proliferation of various cell types. Furthermore, the protein may also be used to determine biological activity, to raise antibodies, as tissue markers, to isolate cognate ligands or receptors, to identify agents that modulate their interactions, in addition to its use as a nutritional supplement. Protein, as well as, antibodies directed against the protein may show utility as a tumor marker and/or immunotherapy targets for the above listed tissues.

[0514] Many polynucleotide sequences, such as EST sequences, are publicly available and accessible through sequence databases. Some of these sequences are related to SEQ ID NO:67 and may have been publicly available prior to conception of the present invention. Preferably, such related polynucleotides are specifically excluded from the scope of the present invention. To list every related sequence is cumbersome. Accordingly, preferably excluded from the present invention are one or more polynucleotides comprising a nucleotide sequence described by the general formula of a−b, where a is any integer between 1 to 870 of SEQ ID NO:67, b is an integer of 15 to 884, where both a and b correspond to the positions of nucleotide residues shown in SEQ ID NO:67, and where b is greater than or equal to a+14.

[0515] Features of Protein Encoder by Gene No: 58

[0516] Preferred polypeptides of the invention comprise the following amino acid sequence: IGCLLATLTGNILCTALESHSVASAHCNLRLLGSSDVHCMNCESKHIIITLDNEPRQF (SEQ ID NO:566). Polynucleotides encoding these polypeptides are also provided.

[0517] This gene is expressed primarily in bone marrow.

[0518] Therefore, polynucleotides and polypeptides of the invention are useful as reagents for differential identification of the tissue(s) or cell type(s) present in a biological sample and for diagnosis of diseases and conditions which include, but are not limited to, diseases and disorders afflicting blood cells. Similarly, polypeptides and antibodies directed to these polypeptides are useful in providing immunological probes for differential identification of the tissue(s) or cell type(s). For a number of disorders of the above tissues or cells, particularly of the hematopoietic system, expression of this gene at significantly higher or lower levels is routinely detected in certain tissues or cell types (e.g., immune, hematopoietic, and cancerous and wounded tissues) or bodily fluids (e.g., lymph; serum, plasma, urine, synovial fluid and spinal fluid) or another tissue or cell sample taken from an individual having such a disorder, relative to the standard gene expression level, i.e., the expression level in healthy tissue or bodily fluid from an individual not having the disorder.

[0519] Preferred polypeptides of the present invention comprise immunogenic epitopes shown in SEQ ID NO: 192 as residues: Pro-30 to Asn-36. Polynucleotides encoding said polypeptides are also provided.

[0520] The tissue distribution in bone marrow indicates that polynucleotides and polypeptides corresponding to this gene are useful for the diagnosis, treatment, and/or prevention of diseases afflicting the blood, including leukemia, neutropenia, anemia, and stem cell protection during chemotherapy. Moreover, polynucleotides and polypeptides corresponding to this gene are useful for the treatment and diagnosis of hematopoietic related disorders such as anemia, pancytopenia, leukopenia, thrombocytopenia or leukemia since stromal cells are important in the production of cells of hematopoietic lineages. Representative uses are described in the “Immune Activity” and “Infectiou's Disease” sections below, in Example 11, 13, 14, 16, t8, 19, 20, and 27, and elsewhere herein. Briefly, the uses include bone marrow cell ex-vivo culture, bone marrow transplantation, bone marrow reconstitution, radiotherapy or chemotherapy of neoplasia.

[0521] The gene product may also be involved in lymphopoiesis, therefore, it can be used in immune disorders such as infection, inflammation, allergy, immunodeficiency etc. In addition, this gene product may have commercial utility in the expansion of stem cells and committed progenitors of various blood lineages, and in the differentiation and/or proliferation of various cell types. Furthermore, the protein may also be used to determine biological activity, to raise antibodies, as tissue markers, to isolate cognate ligands or receptors, to identify agents that modulate their interactions, in addition to its use as a nutritional supplement. Protein, as well as, antibodies directed against the protein may show utility as a tumor marker and/or immunotherapy targets for the above listed tissues.

[0522] Many polynucleotide sequences, such as EST sequences, are publicly available and accessible through sequence databases. Some of these sequences are related to SEQ ID NO:68 and may have been publicly available prior to conception of the present invention. Preferably, such related polynucleotides are specifically excluded from the scope of the present invention. To list every related sequence is cumbersome. Accordingly, preferably excluded from the present invention are one or more polynucleotides comprising a nucleotide sequence described by the general formula of a−b, where a is any integer between 1 to 852 of SEQ ID NO:68, b is an integer of 15 to 866, where both a and b correspond to the positions of nucleotide residues shown in SEQ ID NO:68, and where b is greater than or equal to a+14.

[0523] Features of Protein Encoder by Gene No: 59

[0524] This gene is expressed primarily in hippocampus, and to a lesser extent in fetal heart.

[0525] Therefore, polynucleotides and polypeptides of the invention are useful as reagents for differential identification of the tissue(s) or cell type(s) present in a biological sample and for diagnosis of diseases and conditions which include, but are not limited to, any of a variety of brain disorders including epilepsy, stroke, palsy, and mood disorders including unipolar- and bipolar depression. Similarly, polypeptides and antibodies directed to these polypeptides are useful in providing immunological probes for differential identification of the tissue(s) or cell type(s). For a number of disorders of the above tissues or cells, particularly of the central nervous system, expression of this gene at significantly higher or lower levels is routinely detected in certain tissues or cell types (e.g., brain, heart, cancerous and wounded tissues) or bodily fluids (e.g., serum, plasma, urine, synovial fluid and spinal fluid) or another tissue or cell sample taken from an individual having such a disorder, relative to the standard gene expression level, i.e., the expression level in healthy tissue or bodily fluid from an individual not having the disorder.

[0526] The tissue distribution in hippocampus indicates polynucleotides and polypeptides corresponding to this gene are useful for the detection/treatment of neurodegenerative disease states and behavioural disorders such as Alzheimer's Disease, Parkinson's Disease, Huntington's Disease, Tourette Syndrome, schizophrenia, mania, dementia, paranoia, obsessive compulsive disorder, panic disorder, learning disabilities, epilepsy, stroke, palsy, and mood disorders including unipolar and bipolar depression, ALS, psychoses, autism, and altered behaviors, including disorders in feeding, sleep patterns, balance, and perception. In addition, the gene or gene product may also play a role in the treatment and/or detection of developmental disorders associated with the developing embryo, or sexually-linked disorders. Protein, as well as, antibodies directed against the protein may show utility as a tumor marker and/or immunotherapy targets for the above listed tissues.

[0527] Many polynucleotide sequences, such as EST sequences, are publicly available and accessible through sequence databases. Some of these sequences are related to SEQ ID NO:69 and may have been publicly available prior to conception of the present invention. Preferably, such related polynucleotides are specifically excluded from the scope of the present invention. To list every related sequence is cumbersome. Accordingly, preferably excluded from the present invention are one or more polynucleotides comprising a nucleotide sequence described by the general formula of a−b, where a is any integer between 1 to 1338 of SEQ ID NO:69, b is an integer of 15 to 1352, where both a and b correspond to the positions of nucleotide residues shown in SEQ ID NO:69, and where b is greater than or equal to a+14.

[0528] Features of Protein Encoder by Gene No: 60

[0529] The translation product of this gene shares sequence homology with a C. elegans protein (coded for by C. elegans cDNA yk112f3.5).

[0530] The gene encoding the disclosed cDNA is thought to reside on chromosome 3. Accordingly, polynucleotides related to this invention are useful as a marker in linkage analysis for chromosome 3.

[0531] Preferred polypeptides of the invention comprise the following amino acid sequence: HYFLRTVSGLSVVPVSLRCCMCPPPCTGPAPATAHSPFDPPALPIQFEYQQA (SEQ ID NO:567), QLEAEIENLSWKVERADSYDRGDLENQMHIAEQRRRTLLKDFHDT (SEQ ID NO:568), VPVSLRCCMCPPPCTGPAPATAHS (SEQ ID NO:569), and/or SWKVERADSYDRGDLENQMHIAEQR (SEQ ID NO:570). Polynucleotides encoding these polypeptides are also provided.

[0532] This gene is expressed primarily in fetal liver and spleen.

[0533] Therefore, polynucleotides and polypeptides of the invention are useful as reagents for differential identification of the tissue(s) or cell type(s) present in a biological sample and for diagnosis of diseases and conditions which include, but are not limited to, congenital disorders of the liver and spleen. Similarly, polypeptides and antibodies directed to these polypeptides are useful in providing immunological probes for differential identification of the tissue(s) or cell type(s). For a number of disorders of the above tissues or cells, particularly of the hepatic system, expression of this gene at significantly higher or lower levels is routinely detected in certain tissues or cell types (e.g., immune, hepatic, cancerous and wounded tissues)'or bodily fluids (e.g., serum, plasma, urine, synovial fluid and spinal fluid) or another tissue or cell sample taken from an individual having such a disorder, relative to the standard gene expression level, i.e., the expression level in healthy tissue or bodily fluid from an individual not having the disorder.

[0534] The tissue distribution in fetal liver and spleen indicates polynucleotides and polypeptides corresponding to this gene are useful for the detection and treatment of liver disorders and cancers (e.g. hepatoblastoma, jaundice, hepatitis, liver metabolic diseases and conditions that are attributable to the differentiation of hepatocyte progenitor cells). More generally, as evidenced by expression in fetal liver/spleen, this gene may play a role in the survival, proliferation, and/or differentiation of hematopoietic cells in general, and is of use in augmentation of the numbers of stem cells and committed progenitors. Expression of this gene product in primary dendritic cells also indicates that it may play a role in mediating responses to infection and controlling immunological responses, such as those that occur during immune surveillance. Protein, as well as, antibodies directed against the protein may show utility as a tumor marker and/or immunotherapy targets for the above listed tissues.

[0535] Many polynucleotide sequences, such as EST sequences, are publicly available and accessible through sequence databases. Some of these sequences are related to SEQ ID NO:70 and may have been publicly available prior to conception of the present invention. Preferably, such related polynucleotides are specifically excluded from the scope of the present invention. To list every related sequence is cumbersome. Accordingly, preferably excluded from the present invention are one or more polynucleotides comprising a nucleotide sequence described by the general formula of a−b, where a is any integer between 1 to 899 of SEQ ID NO:70, b is an integer of 15 to 913, where both a and b correspond to the positions of nucleotide residues shown in SEQ ID NO:70, and where b is greater than or equal to a+14.

[0536] Features of Protein Encoder by Gene No: 61

[0537] This gene is expressed primarily in neutrophils.

[0538] Therefore, polynucleotides and polypeptides of the invention are useful as reagents for differential identification of the tissue(s) or cell type(s) present in a biological sample and for diagnosis of diseases and conditions which include, but are not limited to, acute immunological disorders such as inflammation. Similarly, polypeptides and antibodies directed to these polypeptides are useful in providing immunological probes for differential identification of the tissue(s) or cell type(s). For a number of disorders of the above tissues or cells, particularly of the immune system, expression of this gene at significantly higher or lower levels is routinely detected in certain tissues or cell types (e.g., immune, cancerous and wounded tissues) or bodily fluids (e.g., serum, plasma, urine, synovial fluid and spinal fluid) or another tissue or cell sample taken from an individual having such a disorder, relative to the standard gene expression level, i.e., the expression level in healthy tissue or bodily fluid from an individual not having the disorder.

[0539] The tissue distribution in neutrophils indicates polynucleotides and polypeptides corresponding to this gene are useful for treating an acute inflammatory response. Furthermore, this gene product is involved in the regulation of cytokine production, antigen presentation, or other processes that may also suggest a usefulness in the treatment of cancer (e.g. by boosting immune responses).

[0540] Since the gene is expressed in cells of lymphoid origin, the gene or protein, as well as, antibodies directed against the protein may show utility as a tumor marker and/or immunotherapy targets for the above listed tissues. Therefore it is also used as an agent for immunological disorders including arthritis, asthma, immune deficiency diseases such as AIDS, leukemia, rheumatoid arthritis, inflammatory bowel disease, sepsis, acne, and psoriasis. In addition, this gene product may have commercial utility in the expansion of stem cells and committed progenitors of various blood lineages, and in the differentiation and/or proliferation of various cell types. Expression of this gene product in neutrophils also strongly indicates a role for this protein in immune function and immune surveillance. Protein, as well as, antibodies directed against the protein may show utility as a tumor marker and/or immunotherapy targets for the above listed tissues.

[0541] Many polynucleotide sequences, such as EST sequences, are publicly available and accessible through sequence databases. Some of these sequences are related to SEQ ID NO:71 and may have been publicly available prior to conception of the present invention. Preferably, such related polynucleotides are specifically excluded from the scope of the present invention. To list every related sequence is cumbersome. Accordingly, preferably excluded from the present invention are one or more polynucleotides comprising a nucleotide sequence described by the general formula of a−b, where a is any integer between 1 to 707 of SEQ ID NO:71, b is an integer of 15 to 721, where both a and b correspond to the positions of nucleotide residues shown in SEQ ID NO:71, and where b is greater than or equal to a+14.

[0542] Features of Protein Encoded by Gene No: 62

[0543] This gene is expressed primarily in brain and osteoclastoma to a lesser extent in placenta.

[0544] Therefore, polynucleotides and polypeptides of the invention are useful as reagents for differential identification of the tissue(s) or cell type(s) present in a biological sample and for diagnosis of diseases and conditions which include, but are not limited to, neurological, bone and reproductive disorders. Similarly, polypeptides and antibodies directed to these polypeptides are useful in providing immunological probes for differential identification of the tissue(s) or cell type(s). For a number of disorders of the above tissues or cells, particularly of the nervous, bone and reproductive systems, expression of this gene at significantly higher or lower levels is routinely detected in certain tissues or cell types (e.g., skeletal, brain, cancerous and wounded tissues) or bodily fluids (e.g., serum, plasma, urine, synovial fluid and spinal fluid) or another tissue or cell sample taken from an individual having such a disorder, relative to the standard gene expression level, i.e., the expression level in healthy tissue or bodily fluid from an individual not having the disorder.

[0545] Preferred polypeptides of the present invention comprise immunogenic epitopes shown in SEQ ID NO: 196 as residues: Phe-47 to Cys-54. Polynucleotides encoding said polypeptides are also provided.

[0546] Expression of this gene in brain indicates polynucleotides and polypeptides corresponding to this gene are useful for the detection/treatment of neurodegenerative disease states and behavioural disorders such as Alzheimer's Disease, Parkinson's Disease, Huntington's Disease, schizophrenia, mania, dementia, paranoia, obsessive compulsive disorder and panic disorder. Furthermore, expression in osteoclastoma indicates a role in the treatment and/or detection of bone damage such as fractures and dislocations. Elevated levels of expression of this gene product in osteoclastoma indicates that it may play a role in the survival, proliferation, and/or growth of osteoclasts. Therefore, it is useful in influencing bone mass in such conditions as osteoporosis. Expression in the placenta indicates a role in the treatment and/or detection of pregnancy disorders such as miscarriage, birth defects, premature birth, in addition to disorders such as placenta previa and placentitis. Specific expression within the placenta indicates that this gene product may play a role in the proper establishment and maintenance of placental function. Alternately, this gene product is produced by the placenta and then transported to the embryo, where it may play a crucial role in the development and/or survival of the developing embryo or fetus. Expression of this gene product in a vascular-rich tissue such as the placenta also indicates that this gene product is produced more generally in endothelial cells or within the circulation. In such instances, it may play more generalized roles in vascular function, such as in angiogenesis. It may also be produced in the vasculature and have effects on other cells within the circulation, such as hematopoietic cells. It may serve to promote the proliferation, survival, activation, and/or differentiation of hematopoietic cells, as well as other cells throughout the body. Protein, as well as, antibodies directed against the protein may show utility as a tumor marker and/or immunotherapy targets for the above listed tissues.

[0547] Many polynucleotide sequences, such as EST sequences, are publicly available and accessible through sequence databases. Some of these sequences are related to SEQ ID NO:72 and may have been publicly available prior to conception of the present invention. Preferably, such related polynucleotides are specifically excluded from the scope of the present invention. To list every related sequence is cumbersome. Accordingly, preferably excluded from the present invention are one or more polynucleotides comprising a nucleotide sequence described by the general formula of a−b, where a is any integer between 1 to 549 of SEQ ID NO:72, b is an integer of 15 to 563, where both a and b correspond to the positions of nucleotide residues shown in SEQ ID NO:72, and where b is greater than or equal to a+14.

[0548] Features of Protein Encoded by Gene No: 63

[0549] This gene is expressed primarily in Merkel cells.

[0550] Therefore, polynucleotides and polypeptides of the invention are useful as reagents for differential identification of the tissue(s) or cell type(s) present in a biological sample and for diagnosis of diseases and conditions which include, but are not limited to, integumentary disorders, particularly aberrations in mechanic sensory function. Similarly, polypeptides and antibodies directed to these polypeptides are useful in providing immunological probes for differential identification of the tissue(s) or cell type(s). For a number of disorders of the above tissues or cells, particularly in tissues involved in sensory function, expression of this gene at significantly higher or lower levels is routinely detected in certain tissues or cell types (e.g., integumentary, sensory, and cancerous and wounded tissues) or bodily fluids (e.g., lymph, serum, plasma, urine, synovial fluid and spinal fluid) or another tissue or cell sample taken from an individual having such a disorder, relative to the standard gene expression level, i.e., the expression level in healthy tissue or bodily fluid from an individual not having the disorder.

[0551] The tissue distribution in Merkel cells indicates polynucleotides and polypeptides corresponding to this gene are useful for Merkel cell dysfunctions, which may include aberrations in sensory function. Alternatively, polynucleotides and polypeptides corresponding to this gene are useful for the treatment, diagnosis, and/or prevention of various skin disorders including congenital disorders (i.e., nevi, moles, freckles, Mongolian spots, hemangiomas, port-wine syndrome), integumentary tumors (i.e,. keratoses, Bowen's Disease, basal cell carcinoma, squamous cell carcinoma, malignant melanoma, Paget's Disease, mycosis fungoides, and Kaposi's sarcoma), injuries and inflammation of the skin (i.e., wounds, rashes, prickly heat disorder, psoriasis, dermatitis), atherosclerosis, uticaria, eczema, photosensitivity, autoimmune disorders (i.e., lupus erythematosus, vitiligo, dermatomyositis, morphea, scleroderma, pemphigoid, and pemphigus), keloids, striae, erythema, petechiae, purpura, and xanthelasma. In addition, such disorders may predispose increased susceptibility to viral and bacterial infections of the skin (i.e., cold sores, warts, chickenpox, molluscum contagiosum, herpes zoster, boils, cellulitis, erysipelas, impetigo, tinea, althlete's foot, and ringworm). Moreover, the protein product of this gene may also be useful for the treatment or diagnosis of various connective tissue disorders such as arthritis, trauma, tendonitis, chrondomalacia and inflammation, autoimmune disorders such as rheumatoid arthritis, lupus, scleroderma, and dermatomyositis as well as dwarfism, spinal deformation, and specific joint abnormalities as well as chondrodysplasias (i.e., spondyloepiphyseal dysplasia congenita, familial osteoarthritis, Atelosteogenesis type II, metaphyseal chondrodysplasia type Schmid). Furthermore, the protein may also be used to determine biological activity, to raise antibodies, as tissue markers, to isolate cognate ligands or receptors, to identify agents that modulate their interactions, in addition to its use as a nutritional supplement Protein, as well as, antibodies directed against the protein may show utility as a tumor marker and/or immunotherapy targets for the above listed tissues.

[0552] Many polynucleotide sequences, such as EST sequences, are publicly available and accessible through sequence databases. Some of these sequences are related to SEQ ID NO:73 and may have been publicly available prior to conception of the present invention. Preferably, such related polynucleotides are specifically excluded from the scope of the present invention. To list every related sequence is cumbersome. Accordingly, preferably excluded from the present invention are one or more polynucleotides comprising a nucleotide sequence described by the general formula of a−b, where a is any integer between 1 to 1680 of SEQ ID NO:73, b is an integer of 15 to 1694, where both a and b correspond to the positions of nucleotide residues shown in SEQ ID NO:73, and where b is greater than or equal to a+14.

[0553] Features of Protein Encoded by Gene No: 64

[0554] The translation product of this gene shares sequence homology with dihydropyridine receptor or nitrate transporter which are thought to be important in transport of small molecules across the cell membrane.

[0555] Preferred polypeptides of the invention comprise the following amino acid sequence: GTSFSVLSLIHDTG (SEQ ID NO:571).

[0556] In another embodiment, polypeptides comprising the amino acid sequence of the open reading frame upstream of the predicted signal peptide are contemplated by the present invention. Specifically, polypeptides of the invention comprise the following amino acid sequence: GTSFSVLSLIHDTGMTLYSKLLWLFKGELLFPLVLAYVLLLYIVTKFNYLILKLFPNKIQIKRGSIASN RSLESSASLPARKEEKLLKKF (SEQ ID NO:572). Polynucleotides encoding these polypeptides are also provided.

[0557] The gene encoding the disclosed cDNA is believed to reside on chromosome 11. Accordingly, polynucleotides related to this invention are useful as a marker in linkage analysis for chromosome 11.

[0558] This gene is expressed primarily in kidney cortex and muscle tissue from a patient with multiple sclerosis, and to a lesser extent, in fetal liver/spleen.

[0559] Therefore, polynucleotides and polypeptides of the invention are useful as reagents for differential identification of the tissue(s) or cell type(s) present in a biological sample and for diagnosis of diseases and conditions which include, but are not limited to, muscle, urogenital, or renal disorders, particularly musculodegenrative conditions such as multiple sclerosis, in addition to kidney or metabolic disorders and diseases. Similarly, polypeptides and antibodies directed to these polypeptides are useful in providing immunological probes for differential identification of the tissue(s) or cell type(s). For a number of disorders of the above tissues or cells, particularly of the multiple sclerosis and renal system, expression of this gene at significantly higher or lower levels is routinely detected in certain tissues or cell types (e.g., muscle, urogenital, renal, hepatic, metabolic, immune, hematopoietic, and cancerous and wounded tissues) or bodily fluids (e.g., lymph, serum, bile, amniotic fluid, plasma, urine, synovial fluid and spinal fluid) or another tissue or cell sample taken from an individual having such a disorder, relative to the standard gene expression level, i.e., the expression level in healthy tissue or bodily fluid from an individual not having the disorder.

[0560] Preferred polypeptides of the present invention comprise immunogenic epitopes shown in SEQ ID NO: 198 as residues: Ala-66 to Leu-73. Polynucleotides encoding said polypeptides are also provided.

[0561] The tissue distribution in kidney cortex and muscle tissue, combined with the homology to small molecule transporters indicates polynucleotides and polypeptides corresponding to this gene are useful for the diagnosis, treatment, and/or prevention of disorders of renal functions and muscular diseases, including multiple sclerosis, muscular dystrophy, cardiomyopathy, fibroids, myomas, and rhabdomyosarcomas. The tissue distribution in kidney indicates that this gene or gene product could be used in the treatment and/or detection of kidney diseases including renal failure, nephritus, renal tubular acidosis, proteinuria, pyuria, edema, pyelonephritis, hydronephritis, nephrotic syndrome, crush syndrome, glomerulonephritis, hematuria, renal colic and kidney stones, in addition to Wilm's Tumor Disease, and congenital kidney abnormalities such as horseshoe kidney, polycystic kidney, and Falconi's syndrome. Protein, as well as, antibodies directed against the protein may show utility as a tumor marker and/or immunotherapy targets for the above listed tissues. The secreted protein can also be used to determine biological activity, to raise antibodies, as tissue markers, to isolate cognate ligands or receptors, to identify agents that modulate their interactions and as nutritional supplements. It may also have a very wide range of biological activities. Typical of these are cytokine, cell proliferation/differentiation modulating activity or induction of other cytokines; immunostimulating/immunosuppressant activities (e.g. for treating human immunodeficiency virus infection, cancer, autoimmune diseases and allergy); regulation of hematopoiesis (e.g. for treating anemia or as adjunct to chemotherapy); stimulation or growth of bone, cartilage, tendons, ligaments and/or nerves (e.g. for treating wounds, stimulation of follicle stimulating hormone (for control of fertility); chemotactic and chemokinetic activities (e.g. for treating infections, tumors); hemostatic or thrombolytic activity (e.g. for treating hemophilia, cardiac infarction etc.); anti-inflammatory activity (e.g. for treating septic shock, Crohn's Disease); as antimicrobials; for treating psoriasis or other hyperproliferative diseases; for regulation of metabolism, and behavior. Also contemplated is the use of the corresponding nucleic acid in gene therapy procedures. Protein, as well as, antibodies directed against the protein may show utility as a tumor marker and/or immunotherapy targets for the above listed tissues.

[0562] Many polynucleotide sequences, such as EST sequences, are publicly available and accessible through sequence databases. Some of these sequences are related to SEQ ID NO:74 and may have been publicly available prior to conception of the present invention. Preferably, such related polynucleotides are specifically excluded from the scope of the present invention. To list every related sequence is cumbersome. Accordingly. preferably excluded from the present invention are one or more polynucleotides comprising a nucleotide sequence described by the general formula of a−b, where a is any integer between 1 to 1201 of SEQ ID NO:74, b is an integer of 15 to 1215, where both a and b correspond to the positions of nucleotide residues shown in SEQ ID NO:74, and where b is greater than or equal to a+14.

[0563] Features of Protein Encoded by Gene No: 65

[0564] Preferred polypeptides of the invention comprise the following amino acid sequence: VLISASTIGSRTSGAQGMEKMTIPTLAVGEPKTPEKSKCSLKQCFSSCNVHIDHLGLLLKCKF (SEQ ID NO:573), ASTIGSRTSGAQGMEKMTIPTLA (SEQ ID NO:574), and/or GEPKTPEKSKCSLKQCFSSCNVHIDHL (SEQ ID NO:575). Polynucleotides encoding these polypeptides are also provided.

[0565] This gene is expressed primarily in kidney medulla.

[0566] Therefore, polynucleotides and polypeptides of the invention are useful as reagents for differential identification of the tissue(s) or cell type(s) present in a biological sample and for diagnosis of diseases and conditions which include, but are not limited to, renal, urogenital, or more generally, disorders afflicting endothelial tissues. Similarly, polypeptides and antibodies directed to these polypeptides are useful in providing immunological probes for differential identification of the tissue(s) or cell type(s). For a number of disorders of the above tissues or cells, particularly of the renal system, expression of this gene at significantly higher or lower levels is routinely detected in certain tissues or cell types (e.g., renal, urogentital, endothelial, and cancerous and wounded tissues) or bodily fluids (e.g., lymph, serum, plasma, urine, synovial fluid and spinal fluid) or another tissue or cell sample taken from an individual having such a disorder, relative to the standard gene expression level, i.e., the expression level in healthy tissue or bodily fluid from an individual not having the disorder.

[0567] The tissue distribution in kidney medulla indicates polynucleotides and polypeptides corresponding to this gene are useful for the disgnosis, treatment, and/or prevention of renal disorders, including lesions, vascular diseases, hydronephrosis, and renal diseases associated with systemic disorders. Moreover, the gene or gene product could be used in the treatment and/or detection of kidney diseases including renal failure, nephritus, renal tubular acidosis, proteinuria, pyuria, edema, pyelonephritis, hydronephritis, nephrotic syndrome, crush syndrome, glomerulonephritis, hematuria, renal colic and kidney stones, in addition to Wilm's Tumor Disease, and congenital kidney abnormalities such as horseshoe kidney, polycystic kidney, and Falconi's syndrome. The protein product can also be used for the treatment, detection, and/or prevention of various endothelial disorders, which include microvascular disease, embolism, aneurysm, stroke, or atherosclerosis. Furthermore, the protein may also be used to determine biological activity, to raise antibodies, as tissue markers, to isolate cognate ligands or receptors, to identify agents that modulate their interactions, in addition to its use as a nutritional supplement. Protein, as well as, antibodies directed against the protein may show utility as a tumor marker and/or immunotherapy targets for the above listed tissues.

[0568] Many polynucleotide sequences, such as EST sequences, are publicly available and accessible through sequence databases. Some of these sequences are related to SEQ ID NO:75 and may have been publicly available prior to conception of the present invention. Preferably, such related polynucleotides are specifically excluded from the scope of the present invention. To list every related sequence is cumbersome. Accordingly, preferably excluded from the present invention are one or more polynucleotides comprising a nucleotide sequence described by the general formula of a−b, where a is any integer between 1 to 1780 of SEQ ID NO:75, b is an integer of 15 to 1794, where both a and b correspond to the positions of nucleotide residues shown in SEQ ID NO:75, and where b is greater than or equal to a+14.

[0569] Features of Protein Encoded by Gene No: 66

[0570] Preferred polypeptides of the invention comprise the following amino acid sequence: RIRSQDLAIMTTCFKKYEFSFFVLGFLRRWGATLCLGFTSFAIKFHPSSLCSEKEGKDFSGFALSIHGP ERKKEEGWARWLTPVVPVLWEAEVGGSPEVSS (SEQ ID NO:576), TTCFKKYEFSFFVLGFLRRWGA (SEQ ID NO:577), SEKEGKDFSGFALSIHGPERKKEEGW (SEQ ID NO:578), MNECIAKPCMAAFCSCPSCCLPSRPGCSREQRCAFSCEPCHTVEHWVEPMGQGQRQEHTQGSVLPSSHP SRGKATTVHSCCQEPWG (SEQ ID NO:579), FCSCPSCCLPSRPGCSREQRCAFSCEP (SEQ ID NO:580), GQRQEHTQGSVLPSSHPSRGKAT (SEQ ID NO:581), GVVNSCLLPLPPRLLATGMDCGGFASRRMGGRQHAALSVFLPLPLAHGLYPMFNCVAGLTGKGTSLLSG AARPAGEAAARAGTKGSHARFGNAFIHSFIHSFIECLLNTYCVPSSALTAVGIGDILKNKNDKSSC LCSC (SEQ ID NO:582), GMDCGGFASRRMGGRQHAALSVFLP (SEQ ID NO:583), LTGKGTSLLSGAARPAGEAAARAGT.(SEQ ID NO:584), and/or LNTYCVPSSALTAVGIGDILKN (SEQ ID NO:585). Polynucleotides encoding these polypeptides are also provided.

[0571] This gene is expressed primarily in fetal lung.

[0572] Therefore, polynucleotides and polypeptides of the invention are useful as reagents for differential identification of the tissue(s) or cell type(s) present in a biological sample and for diagnosis of diseases and conditions which include, but are not limited to, pulmonary or developmental disorders and/or diseases. Similarly, polypeptides and antibodies directed to these polypeptides are useful in providing immunological probes for differential identification of the tissue(s) or cell type(s). For a number of disorders of the above tissues or cells, particularly of the pulmonary system, expression of this gene at significantly higher or lower levels is routinely detected in certain tissues or cell types (e.g., pulmonary, developmental, and cancerous and wounded tissues) or bodily fluids (e.g., lymph, serum, plasma, pulmonary surfactant or sputum, urine, synovial fluid and spinal fluid) or another tissue or cell sample taken from an individual having such a disorder, relative to the standard gene expression level, i.e., the expression level in healthy tissue or bodily fluid from an individual not having the disorder.

[0573] The tissue distribution in fetal lung indicates polynucleotides and polypeptides corresponding to this gene are useful for diagnosis and intervention of diseases related to pulmonary functions and infections. Moreover, the expression within fetal tissue indicates that this protein may play a role in the regulation of cellular division, and may show utility in the diagnosis and treatment of cancer and other proliferative disorders. Similarly, developmental tissues rely on decisions involving cell differentiation and/or apoptosis in pattern formation. Thus this protein may also be involved in apoptosis or tissue differentiation and could again be useful in cancer therapy. Furthermore, the protein may also be used to determine biological activity, to raise antibodies, as tissue markers, to isolate cognate ligands or receptors, to identify agents that modulate their interactions, in addition to its use as a nutritional supplement. Protein, as well as, antibodies directed against the protein may show utility as a tumor marker and/or immunotherapy targets for the above listed tissues.

[0574] Many polynucleotide sequences, such as EST sequences, are publicly available and accessible through sequence databases. Some of these sequences are related to SEQ ID NO:76 and may have been publicly available prior to conception of the present invention. Preferably, such related polynucleotides are specifically excluded from the scope of the present invention. To list every related sequence is cumbersome. Accordingly, preferably excluded from the present invention are one or more polynucleotides comprising a nucleotide sequence described by the general formula of a−b, where a is any integer between 1 to 1160 of SEQ ID NO:76, b is an integer of 15 to 1174, where both a and b correspond to the positions of nucleotide residues shown in SEQ ID NO:76, and where b is greater than or equal to a+14.

[0575] Features of Protein Encoded by Gene No: 67

[0576] This gene is expressed primarily in hepatocellular tumors.

[0577] Therefore, polynucleotides and polypeptides of the invention are useful as reagents for differential identification of the tissue(s) or cell type(s) present in a biological sample and for diagnosis of diseases and conditions which include, but are not limited to, metabolic or hepatic disorders or diseases, particularly hepatocellular tumors. Similarly, polypeptides and antibodies directed to these polypeptides are useful in providing immunological probes for differential identification of the tissue(s) or cell type(s). For a number of disorders of the above tissues or cells, particularly of the liver, expression of this gene at significantly higher or lower levels is routinely detected in certain tissues or cell types (e.g., metabolic, hepatic, and cancerous and wounded tissues) or bodily fluids (e.g., lymph, serum, bile, plasma, urine, synovial fluid and spinal fluid) or another tissue or cell sample taken from an individual having such a disorder, relative to the standard gene expression level, i.e., the expression level in healthy tissue or bodily fluid from an individual not having the disorder.

[0578] The tissue distribution in hepatocellular tumors indicates polynucleotides and polypeptides corresponding to this gene are useful for disgnosis and treatment of hepatic disorders, particularly proliferative conditions such as hepatocellular tumors. Moreover, polynucleotides and polypeptides corresponding to this gene are useful for the detection and treatment of liver disorders and cancers (e.g., hepatoblastoma, jaundice, hepatitis, liver metabolic diseases and conditions that are attributable to the differentiation of hepatocyte progenitor cells). In addition, the protein may play a role in the treatment, detection, and/or prevention of developmental abnormnalities, fetal deficiencies, pre-natal disorders and various would-healing models and/or tissue trauma. Furthermore, the protein may also be used to determine biological activity, to raise antibodies, as tissue markers, to isolate cognate ligands or receptors, to identify agents that modulate their interactions, in addition to its use as a nutritional supplement. Protein, as well as, antibodies directed against the protein may show utility as a tumor marker and/or immunotherapy targets for the above listed tissues.

[0579] Many polynucleotide sequences, such as EST sequences, are publicly available and accessible through sequence databases. Some of these sequences are related to SEQ ID NO:77 and may have been publicly available prior to conception of the present invention. Preferably, such related polynucleotides are specifically excluded from the scope of the present invention. To list every related sequence is cumbersome. Accordingly, preferably excluded from the present invention are one or more polynucleotides comprising a nucleotide sequence described by the general formula of a−b, where a is any integer between 1 to 1073 of SEQ ID NO:77, b is an integer of 15 to 1087, where both a and b correspond to the positions of nucleotide residues shown in SEQ ID NO:77, and where b is greater than or equal to a+14.

[0580] Features of Protein Encoded by Gene No: 68

[0581] This gene is expressed primarily in bone marrow.

[0582] Therefore, polynucleotides and polypeptides of the invention are useful as reagents for differential identification of the tissue(s) or cell type(s) present in a biological sample and for diagnosis of diseases and conditions which include, but are not limited to, leukemia immune deficiency syndromes, and other immune related diseases. Similarly, polypeptides and antibodies directed to these polypeptides are useful in providing immunological probes for differential identification of the tissue(s) or cell type(s). For a number of disorders of the above tissues or cells, particularly of the immune system, expression of this gene at significantly higher or lower levels is routinely detected in certain tissues or cell types (e.g., immune, cancerous and wounded tissues) or bodily fluids (e.g., serum, plasma, urine, synovial fluid and spinal fluid) or another tissue or cell sample taken from an individual having such a disorder, relative to the standard gene expression level, i.e., the expression level in healthy tissue or bodily fluid from an individual not having the disorder.

[0583] The tissue distribution indicates polynucleotides and polypeptides corresponding to this gene are useful for the treatment and diagnosis of diseases of bone marrow, such as leukemia, bone cancer and immune deficiency syndrome. Furthermore, the polypeptides or polynucleotides are also useful to enhance or protect proliferation, differentiation, and functional activation of hematopoietic progenitor cells (e.g., bone marrow cells), useful in treating cancer patients undergoing chemotherapy or patients undergoing bone marrow transplantation. The uses include bone marrow cell ex-vivo culture, bone marrow transplantation, bone marrow reconstitution, radiotherapy or chemotherapy of neoplasia. Protein, as well as, antibodies directed against the protein may show utility as a tumor marker and/or immunotherapy targets for the above listed tissues.

[0584] Many polynucleotide sequences, such as EST sequences, are publicly available and accessible through sequence databases. Some of these sequences are related to SEQ ID NO:78 and may have been publicly available prior to conception of the present invention. Preferably, such related polynucleotides are specifically excluded from the scope of the present invention. To list every related sequence is cumbersome. Accordingly, preferably excluded from the present invention are one or more polynucleotides comprising a nucleotide sequence described by the general formula of a−b, where a is any integer between 1 to 1253 of SEQ ID NO:78, b is an integer of 15 to 1267, where both a and b correspond to the positions of nucleotide residues shown in SEQ ID NO:78, and where b is greater than or equal to a+14.

[0585] Features of Protein Encoded by Gene No: 69

[0586] When tested against sensory neuron cell lines, supernatants removed from cells containing this gene activated the EGRI assay. Thus, it is likely that this gene activates sensory neuronal cells through a signal transduction pathway. Early growth response 1 (EGR1) is a promoter associated with certain genes that induces various tissues and cell types upon activation, leading the cells to undergo differentiation and proliferation.

[0587] This gene is expressed primarily in the testes.

[0588] Therefore, polynucleotides and polypeptides of the invention are useful as reagents for differential identification of the tissue(s) or cell type(s) present in a biological sample and for diagnosis of diseases and conditions which include, but are not limited to, reproductive system-related diseases. Similarly, polypeptides and antibodies directed to these polypeptides are useful in providing immunological probes for differential identification of the tissue(s) or cell type(s). For a number of disorders of the above tissues or cells, particularly of the reproductive system, expression of this gene at significantly higher or lower levels is routinely detected in certain tissues or cell types (e.g., testes, cancerous and wounded tissues) or bodily fluids (e.g., serum, plasma, urine, synovial fluid and spinal fluid) or another tissue or cell sample taken from an individual having such a disorder, relative to the standard gene expression level, i.e., the expression level in healthy tissue or bodily fluid from an individual not having the disorder.

[0589] The tissue distribution in testes indicates polynucleotides and polypeptides corresponding to this gene are useful for the diagnosis, treatment, and/or prevention of reproductive system-related diseases. Furthermore, the tissue distribution indicates that polynucleotides and polypeptides corresponding to this gene are useful for the treatment and diagnosis of conditions concerning proper testicular function (e.g. endocrine function, sperm maturation), as well as cancer. Therefore, this gene product is useful in the treatment of male infertility and/or impotence. This gene product is also useful in assays designed to identify binding agents, as such agents (antagonists) are useful as male contraceptive agents. Similarly, the protein is believed to be useful in the treatment and/or diagnosis of testicular cancer. The testes are also a site of active gene expression of transcripts that is expressed, particularly at low levels, in other tissues of the body. Therefore, this gene product is expressed in other specific tissues or organs where it may play related functional roles in other processes, such as hematopoiesis, inflammation, bone formation, and kidney function, to name a few possible target indications.

[0590] Many polynucleotide sequences, such as EST sequences, are publicly available and accessible through sequence databases. Some of these sequences are related to SEQ ID NO:79 and may have been publicly available prior to conception of the present invention. Preferably, such related polynucleotides are specifically excluded from the scope of the present invention. To list every related sequence is cumbersome. Accordingly, preferably excluded from the present invention are one or more polynucleotides comprising a nucleotide sequence described by the general formula of a−b, where a is any integer between 1 to 1734 of SEQ ID NO:79, b is an integer of 15 to 1748, where both a and b correspond to the positions of nucleotide residues shown in SEQ ID NO:79, and where b is greater than or equal to a+14.

[0591] Features of Protein Encoded by Gene No: 70

[0592] This gene is expressed primarily in T-cells, bone marrow, fetal liver/spleen and and to a lesser extent in adipocytes, kidney, melanocytes and stimulated fibroblasts.

[0593] Therefore, polynucleotides and polypeptides of the invention are useful as reagents for differential identification of the tissue(s) or cell type(s) present in a biological sample and for diagnosis of diseases and conditions which include, but are not limited to, hematopoeitic disease characterized by alterations in T cells. Similarly, polypeptides and antibodies directed to these polypeptides are useful in providing immunological probes for differential identification of the tissue(s) or cell type(s). For a number of disorders of the above tissues or cells, particularly of the immune system, expression of this gene at significantly higher or lower levels is routinely detected in certain tissues or cell types (e.g., immune, cancerous and wounded tissues) or bodily fluids (e.g., serum, plasma, urine, synovial fluid and spinal fluid) or another tissue or cell sample taken from an individual having such a disorder, relative to the standard gene expression level, i.e., the expression level in healthy tissue or bodily fluid from an individual not having the disorder.

[0594] The tissue distribution in immune tissues indicates polynucleotides and polypeptides corresponding to this gene are useful for treating autoimmune diseases or proliferative disorders of the developing immune system. This gene product is primarily expressed in hematopoietic cells and tissues, suggesting that it plays a role in the survival, proliferation, and/or differentiation of hematopoieitic lineages. This is particularly supported by the expression of this gene product in fetal liver and bone marrow, the two primary sites of definitive hematopoiesis. Expression of this gene product in T cells also strongly indicates a role for this protein in immune function and immune surveillance. Protein, as well as, antibodies directed against the protein may show utility as a tumor marker and/or immunotherapy targets for the above listed tissues.

[0595] Many polynucleotide sequences, such as EST sequences, are publicly available and accessible through sequence databases. Some of these sequences are related to SEQ ID NO:80 and may have been publicly available prior to conception of the present invention. Preferably, such related polynucleotides are specifically excluded from the scope of the present invention. To list every related sequence is cumbersome. Accordingly, preferably excluded from the present invention are one or more polynucleotides comprising a nucleotide sequence described by the general formula of a−b, where a is any integer between 1 to 1310 of SEQ ID NO:80, b is an integer of 15 to t324, where both a and b correspond to the positions of nucleotide residues shown-in SEQ ID NO:80, and where b is greater than or equal to a+14.

[0596] Features of Protein Encoded by Gene No: 71

[0597] The gene encoding the disclosed cDNA is thought to reside on chromosome 4. Accordingly, polynucleotides related to this invention are useful as a marker in linkage analysis for chromosome 4.

[0598] This gene is expressed primarily in fetal tissues including fetal liver/spleen and to a lesser extent in lung, bone marrow, adrenal gland tumor and in the Ntera2 cell line.

[0599] Therefore, polynucleotides and polypeptides of the invention are useful as reagents for differential identification of the tissue(s) or cell type(s) present in a biological sample and for diagnosis of diseases and conditions which include, but are not limited to, cancers Similarly, polypeptides and antibodies directed to these polypeptides are useful in providing immunological probes for differential identification of the tissue(s) or cell type(s). For a number of disorders of the above tissues or cells, particularly of the adrenal gland or lungs, expression of this gene at significantly higher or lower levels is routinely detected in certain tissues or cell types (e.g., developing tissues, cancerous and wounded tissues) or bodily fluids (e.g., serum, plasma, urine, synovial fluid and spinal fluid) or another tissue or cell sample taken from an individual having such a disorder, relative to the standard gene expression level, i.e., the expression level in healthy tissue or bodily fluid from an individual not having the disorder.

[0600] The tissue distribution in fetal and developing tissues indicates polynucleotides and polypeptides corresponding to this gene are useful for treating tumors formed by poorly differentiated cells, as well as tumors of other tissues where expression has been observed. Protein, as well as, antibodies directed against the protein may show utility as a tumor marker and/or immunotherapy targets for the above listed tissues.

[0601] Many polynucleotide sequences, such as EST sequences, are publicly available and accessible through sequence databases. Some of these sequences are related to SEQ ID NO:81 and may have been publicly available prior to conception of the present invention. Preferably, such related polynucleotides are specifically excluded from the scope of the present invention. To list every related sequence is cumbersome. Accordingly, preferably excluded from the present invention are one or more polynucleotides comprising a nucleotide sequence described by the general formula of a−b, where a is any integer between 1 to 1717 of SEQ ID NO:81, b is an integer of 15 to 1731, where both a and b correspond to the positions of nucleotide residues shown in SEQ ID NO:81, and where b is greater than or equal to a+14.

[0602] Features of Protein Encoded by Gene No: 72

[0603] This gene is expressed primarily in the prostate derived cell line PC3 and fetal liver/spleen.

[0604] Therefore, polynucleotides and polypeptides of the invention are useful as reagents for differential identification of the tissue(s) or cell type(s) present in a biological sample and for diagnosis of diseases and conditions which include, but arc not limited to, prostatic hypertrophy or prostate cancer. Similarly, polypeptides and antibodies directed to these polypeptides are useful in providing immunological probes for differential identification of the tissue(s) or cell type(s). For a number of disorders of the above tissues or cells, particularly of the glandular tissues, expression of this gene at significantly higher or lower levels is routinely detected in certain tissues or cell types (e.g., prostate, immune, cancerous and wounded tissues) or bodily fluids (e.g., serum, plasma, urine, synovial fluid and spinal fluid) or another tissue or cell sample taken from an individual having such a disorder, relative to the standard gene expression level, i.e., the expression level in healthy tissue or bodily fluid from an individual not having the disorder.

[0605] Preferred polypeptides of the present invention comprise immunogenic epitopes shown in SEQ ID NO: 206 as residues: Leu-26 to Ser-33. Polynucleotides encoding said polypeptides are also provided.

[0606] The tissue distribution indicates polynucleotides and polypeptides corresponding to this gene are useful for treating diseases of the prostate including prostatic tumors or benign prostatic hypertrophy. Protein, as well as, antibodies directed against the protein may show utility as a tumor marker and/or immunotherapy targets for the above listed tissues.

[0607] Many polynucleotide sequences, such as EST sequences, are publicly available and accessible through sequence databases. Some of these sequences are related to SEQ ID NO:82 and may have been publicly available prior to conception of the present invention. Preferably, such related polynucleotides are specifically excluded from the scope of the present invention. To list every related sequence is cumbersome. Accordingly, preferably excluded from the present invention are one or more polynucleotides comprising a nucleotide sequence described by the General formula of a−b, where a is any integer between 1 to 1452 of SEQ ID NO:82, b is an integer of 15 to 1466, where both a and b correspond to the positions of nucleotide residues shown in SEQ ID NO:82, and where b is greater than or equal to a+14.

[0608] Features of Protein Encoded by Gene No: 73

[0609] This gene is expressed primarily in small intestine, and to a lesser extent in breast tissue.

[0610] Therefore, polynucleotides and polypeptides of the invention are useful as reagents for differential identification of the tissue(s) or cell type(s) present in a biological sample and for diagnosis of diseases and conditions which include, but are not limited to, diseases of the small intestine. Similarly, polypeptides and antibodies directed to these polypeptides are useful in providing immunological probes for differential identification of the tissue(s) or cell type(s). For a number of disorders of the above tissues or cells, particularly of the small intestine, expression of this gene at significantly higher or lower levels is routinely detected in certain tissues or cell types (e.g., small intestine, cancerous and wounded tissues) or bodily fluids (e.g., serum, plasma, urine, synovial fluid and spinal fluid) or another tissue or cell sample taken from an individual having such a disorder, relative to the standard gene expression level, i.e., the expression level in healthy tissue or bodily fluid from an individual not having the disorder.

[0611] Preferred polypeptides of the present invention comprise immunogenic epitopes shown in SEQ ID NO: 207 as residues: Glu-37 to Gly-45. Polynucleotides encoding said polypeptides are also provided.

[0612] The tissue distribution indicates polynucleotides and polypeptides corresponding to this gene are useful for the diagnosis and treatment of diseases involving the small intestine, such as cancer of the small intestine or other tissues where expression has been indicated. Protein, as well as, antibodies directed against the protein may show utility as a tumor marker and/or immunotherapy targets for the above listed tissues.

[0613] Many polynucleotide sequences, such as EST sequences, are publicly available and accessible through sequence databases. Some of these sequences are related to SEQ ID NO:83 and may have been publicly available prior to conception of the present invention. Preferably, such related polynucleotides are specifically excluded from the scope of the present invention. To list every related sequence is cumbersome. Accordingly, preferably excluded from the present invention are one or more polynucleotides comprising a nucleotide sequence described by the general formula of a−b, where a is any integer between 1 to 1289 of SEQ ID NO:83, b is an integer of 15 to 1303, where both a and b correspond to the positions of nucleotide residues shown in SEQ ID NO:83, and where b is greater than or equal to a+14.

[0614] Features of Protein Encoded by Gene No: 74

[0615] This gene is expressed primarily in fast-growing tissues such as tumor and fetal tissues.

[0616] Therefore, polynucleotides and polypeptides of the invention are useful as reagents for differential identification of the tissue(s) or cell type(s) present in a biological sample and for diagnosis of diseases and conditions which include, but are not limited to, growth disorders such as tumorigenesis and growth retardation. Similarly, polypeptides and antibodies directed to these polypeptides are useful in providing immunological probes for differential identification of the tissue(s) or cell type(s). For a number of disorders of the above tissues or cells, particularly of the fast-growing tissues, expression of this gene at significantly higher or lower levels is routinely detected in certain tissues or cell types (e.g., rapidly proliferating cells, cancerous and wounded tissues) or bodily fluids (e.g., serum, plasma, urine, synovial fluid and spinal fluid) or another tissue or cell sample taken from an individual having such a disorder, relative to the standard gene expression level, i.e., the expression, level in healthy tissue or bodily fluid from an individual not having the disorder.

[0617] Preferred polypeptides of the present invention comprise immunogenic epitopes shown in SEQ ID NO: 208 as residues: Phe-32 to Cys-37. Polynucleotides encoding said polypeptides are also provided.

[0618] The tissue distribution in rapidly-proliferating tissues and cells indicates polynucleotides and polypeptides corresponding to this gene are useful for the diagnosis, treatment, and/or prevention of growth disorders. Furthermore, the tissue distribution indicates polynucleotides and polypeptides corresponding to this gene are useful for the diagnosis and treatment of cancer and other proliferative disorders. Expression within embryonic tissue and other cellular sources marked by proliferating cells indicates that this protein may play a role in the regulation of cellular division. Similarly, embryonic development also involves decisions involving cell differentiation and/or apoptosis in pattern formation. Thus, this protein may also be involved in apoptosis or tissue differentiation and could again be useful in cancer therapy. Protein, as well as, antibodies directed against the protein may show utility as a tumor marker and/or immunotherapy targets for the above listed tissues.

[0619] Many polynucleotide sequences, such as EST sequences, are publicly available and accessible through sequence databases. Some of these sequences are related to SEQ ID NO:84 and may have been publicly available prior to conception of the present invention. Preferably, such related polynucleotides are specifically excluded from the scope of the present invention. To list every related sequence is cumbersome. Accordingly, preferably excluded from the present invention are one or more polynucleotides comprising a nucleotide sequence described by the general formula of a−b, where a is any integer between 1 to 1502 of SEQ ID NO:84, b is an integer of 15 to 1516, where both a and b correspond to the positions of nucleotide residues shown in SEQ ID NO:84, and where b is greater than or equal to a+14.

[0620] Features of Protein Encoded by Gene No: 75

[0621] When tested against Jurkat T-cells and U937 Myeloid cell lines, supernatants removed from cells containing this gene activated the GAS assay. Thus, it is likely that this gene activates both T-cells and myeloid cells through the Jak-STAT signal transduction pathway. The gamma activating sequence (GAS) is a promoter element found upstream of many genes which are involved in the Jak-STAT pathway. The Jak-STAT pathway is a large, signal transduction pathway involved in the differentiation and proliferation of cells. Therefore, activation of the Jak-STAT pathway, reflected by the binding of the GAS element, can be used to indicate proteins involved in the proliferation and differentiation of cells.

[0622] This gene is expressed primarily in placenta, and to a lesser extent in the endometrium.

[0623] Therefore, polynucleotides and polypeptides of the invention are useful as reagents for differential identification of the tissue(s) or cell type(s) present in a biological sample and for diagnosis of diseases and conditions which include, but are not limited to, pregnancy disorders. Similarly, polypeptides and antibodies directed to these polypeptides are useful in providing immunological probes for differential identification of the tissue(s) or cell type(s). For a number of disorders of the above tissues or cells, particularly of the female reproductive system, expression of this gene at significantly higher or lower levels is routinely detected in certain tissues or cell types (e.g., placental, reproductive, cancerous and wounded tissues) or bodily fluids (e.g., serum, plasma, urine, synovial fluid and spinal fluid) or another tissue or cell sample taken from an individual having such a disorder, relative to the standard gene expression level, i.e., the expression level in healthy tissue or bodily fluid from an individual not having the disorder.

[0624] Expression of this gene in the placenta and endometrium indicates a role in the treatment and/or detection of pregnancy disorders such as miscarriage, birth defects, premature birth, in addition to disorders such as endometriosis, placenta previa and placentitis. Furthermore, the tissue distribution indicates polynucleotides and polypeptides corresponding to this gene are useful for the diagnosis and/or treatment of disorders of the placenta. Specific expression within the placenta indicates that this gene product may play a role in the proper establishment and maintenance of placental function. Alternately, this gene product is produced by the placenta and then transported to the embryo, where it may play a crucial role in the development and/or survival of the developing embryo or fetus.

[0625] Expression of this gene product in a vascular-rich tissue such as the placenta also indicates that this gene product is produced more generally in endothelial cells or within the circulation. In such instances, it may play more generalized roles in vascular function, such as in angiogenesis. It may also be produced in the vasculature and have effects on other cells within the circulation, such as hematopoietic cells. It may serve to promote the proliferation, survival, activation, and/or differentiation of hematopoietic cells. as well as other cells throughout the body. Alternatively, the tissue distribution indicates polynucleotides and polypeptides corresponding to this gene are useful for treating female infertility. The protein product is likely involved in preparation of the endometrium of implantation and could be administered either topically or orally. Alternatively, this gene could be transfected in gene-replacement treatments into the cells of the endometrium and the protein products could be produced. Similarly, these treatments could be performed during artificial insemination for the purpose of increasing the likelyhood of implantation and development of a healthy embryo. In both cases this gene or its gene product could be administered at later stages of pregnancy to promote heathy development of the endometrium. Protein, as well as, antibodies directed against the protein may show utility as a tumor marker and/or immunotherapy targets for the above listed tissues.

[0626] Many polynucleotide sequences, such as EST sequences, are publicly available and accessible through sequence databases. Some of these sequences are related to SEQ ID NO:85 and may have been publicly available prior to conception of the present invention. Preferably, such related polynucleotides are specifically excluded from the scope of the present invention. To list every related sequence is cumbersome. Accordingly, preferably excluded from the present invention are one or more polynucleotides comprising a nucleotide sequence described by the general formula of a−b, where a is any integer between 1 to 1675 of SEQ ID NO:85, b is an integer of 15 to 1689, where both a and b correspond to the positions of nucleotide residues shown in SEQ ID NO:85, and where b is greater than or equal to a+14.

[0627] Features of Protein Encoded by Gene No: 76

[0628] The translation product of this gene has homology to a contains a helix-loop-helix motif from a Caenorhabditis elegans protein (See Genbank Accession No. gi|1326280) which is thought to function as a modulator of gene expression.

[0629] Preferred polypeptides of the invention comprise the following amino acid sequence: TSLSQLWHFCHFWPVKFCCGGCPVHCRMFSSISGLYLLNASAPSLQLNDPKCLQT (SEQ ID NO:586), and/or WPVKFCCGGCPVHCRMFSSISGLYLLNA (SEQ ID NO:587). Polynucleotides encoding these polypeptides are also provided.

[0630] This gene is expressed primarily in normal breast.

[0631] Therefore, polynucleotides and polypeptides of the invention are useful as reagents for differential identification of the tissue(s) or cell type(s) present in a biological sample and for diagnosis of diseases and conditions which include, but are not limited to, reproductive, or endocrine disorders, particularly of the breast, such as breast cancer. Similarly, polypeptides and antibodies directed to these polypeptides are useful in providing immunological probes for differential identification of the tissue(s) or cell type(s). For a number of disorders of the above tissues or cells, particularly of the cancer and metabolic systems, expression of this gene at significantly higher or lower levels is routinely detected in certain tissues or cell types (e.g., reproductive, endocrine, and cancerous and wounded tissues) or bodily fluids (e.g., lymph, serum, plasma, breast milk, urine, synovial fluid and spinal fluid) or another tissue or cell sample taken from an individual having such a disorder, relative to the standard gene expression level, i.e., the expression level in healthy tissue or bodily fluid from an individual not having the disorder.

[0632] The tissue distribution in breast indicates polynucleotides and polypeptides corresponding to this gene are useful for the diagnosis, treatment, and/or prevention of some types of breast cancer. Representative uses are described in the “Hyperproliferative Disorders” and “Regeneration” sections below and elsewhere herein. The protein can also be used for the treatment, detection, and/or prevention of disorders related to ductile tissues or cell types, particularly secretory dysfunctions. The protein can also be used for the treatment of vascular disorders such as atherosclerosis, microvascular disease, embolism, stroke, or aneurysm. Protein, as well as, antibodies directed against the protein may show utility as a tumor marker and/or immunotherapy targets for the above listed tissues.

[0633] Many polynucleotide sequences, such as EST sequences, are publicly available and accessible through sequence databases. Some of these sequences are related to SEQ ID NO:86 and may have been publicly available prior to conception of the present invention. Preferably, such related polynucleotides are specifically excluded from the scope of the present invention. To list every related sequence is cumbersome. Accordingly, preferably excluded from the present invention are one or more polynucleotides comprising a nucleotide sequence described by the general formula of a−b, where a is any integer between 1 to 424 of SEQ ID NO:86, b is an integer of 15 to 438, where both a and b correspond to the positions of nucleotide residues shown in SEQ ID NO:86, and where b is greater than or equal to a+14.

[0634] Features of Protein Encoded by Gene No: 77

[0635] When tested against U937 Myeloid cell lines, supernatants removed from cells containing this gene activated the GAS assay. Thus, it is likely that this gene activates myeloid cells through the Jak-STAT signal transduction pathway. The gamma activating sequence (GAS) is a promoter element found upstream of many genes which are involved in the Jak-STAT pathway. The Jak-STAT pathway is a large, signal transduction pathway involved in the differentiation and proliferation of cells. Therefore, activation of the Jak-STAT pathway, reflected by the binding of the GAS element, can be used to indicate proteins involved in the proliferation and differentiation of cells.

[0636] In specific embodiments, polypeptides of the invention comprise the following amino acid sequence or a fragment thereof as defined elsewhere herein: MKGVGMKKAGHLVRVGPVGARSSRRQSQKKTVSLAPQSWMKNLKKNSTASLNIVLL HLTGNVYLSQEKRRRLEMCPQNRLKPAKVLSXLRKRTXSXKLSANXSTKRRSPMFRKKEVGXNGXTSNS SWMPFTLQKPYFQKTETPWSLFIRLKISHPFSTLQSQQQRKNLWWAAKREKQGKPRLHTLSGQQMAGYH QQEVLWMTNQRNNCRGVSLKQLRQTAMTNAHTTPRSGRRGAXLQKCLPCLRSLASLRWLKWQPWKMCTE VRG QLRSPMMDSQKKCRSCLYLFPALTSEAPFHCKTLCFTYYPSLVFTEGC (SEQ ID NO:588) or GTGXTXSGKGNSSDHEGCWNEESWTFSQSGTSGSKKFKKTKPKEDCLLGSAKLDEEFEKKFNSLP QYSPVTFDRKCVPVPRKKKKTGNVSSEPTKTSKGPFXXQKKNLFXKIVSKXKHKKEKPNVPEKGSGXKW SNKQLFLDAIHPTEAIFSEDRNTMEPVHKVKNIPSIFNTPEPTTTQEPLVGSQKRKARKTKITHLVRTA DGRVSPAGGTLDDKPKEQLQRSLPKATETDCNDKCSHNTEVGETRSXTPEMPAVSAFFSLAALAEVAAM ENVHRGQRSTPLTHDGQPKEMPQLPVLISCADQ (SEQ ID NO:589). Polynucleotides encoding such polypeptides and polypeptide fragments are also provided.

[0637] This gene is expressed primarily in fetal liver and fetal spleen.

[0638] Therefore, polynucleotides and polypeptides of the invention are useful as reagents for differential identification of the tissue(s) or cell type(s) present in a biological sample and for diagnosis of diseases and conditions which include, but are not limited to, developmental and/or immune disorders. Similarly, polypeptides and antibodies directed to these polypeptides are useful in providing immunological probes for differential identification of the tissue(s) or cell type(s). For a number of disorders of the above tissues or cells, particularly of the immune and developmental systems, expression of this gene at significantly higher or lower levels is routinely detected in certain tissues or cell types (e.g., liver, spleen, cancerous and wounded tissues) or bodily fluids (e.g., serum, plasma, urine, synovial fluid and spinal fluid) or another tissue or cell sample taken from an individual having such a disorder, relative to the standard gene expression level, i.e., the expression level in healthy tissue or bodily fluid from an individual not having the disorder.

[0639] Preferred polypeptides of the present invention comprise immunogenic epitopes shown in SEQ ID NO: 211 as residues: His-23 to Leu-3 1, His-33 to Pro-41. Polynucleotides encoding said polypeptides are also provided.

[0640] The distribution of this gene in fetal liver and fetal spleen and the biological activity data indicates it may play a role in the development of the immune and hematopoetic systems. It may, therefore, play a role in the treatment and/or detection of immune and/or hematopoetic disorders including leukemia, arthritis and asthma. Furthermore, this gene product is involved in the regulation of cytokine production, antigen presentation, or other processes that may also suggest a usefulness in the treatment of cancer (e.g. by boosting immune responses).

[0641] Since the gene is expressed in cells of lymphoid origin, the gene or protein, as well as, antibodies directed against the protein may show utility as a tumor marker and/or immunotherapy targets for the above listed tissues. Therefore it is also used as an agent for immunological disorders including arthritis, asthma, immune deficiency diseases such as AIDS, leukemia, rheumatoid arthritis, inflammatory bowel disease, sepsis, acne, and psoriasis. In addition, this gene product may have commercial utility in the expansion of stem cells and committed progenitors of various blood lineages, and in the differentiation and/or proliferation of various cell types. Protein, as well as, antibodies directed against the protein may show utility as a tumor marker and/or immunotherapy targets for the above listed tissues.

[0642] Many polynucleotide sequences, such as EST sequences, are publicly available and accessible through sequence databases. Some of these sequences are related to SEQ ID NO:87 and may have been publicly available prior to conception of the present invention. Preferably, such related polynucleotides are specifically excluded from the scope of the present invention. To list every related sequence is cumbersome. Accordingly, preferably excluded from the present invention are one or more polynucleotides comprising a nucleotide sequence described by the general formula of a−b, where a is any integer between 1 to 5264 of SEQ ID NO:87, b is an integer of 15 to 5278, where both a and b correspond to the positions of nucleotide residues shown in SEQ ID NO:87, and where b is greater than or equal to a+14.

[0643] Features of Protein Encoded by Gene No: 78

[0644] When tested against K562 cell lines, supernatants removed from cells containing this gene activated the ISRE (interferon-sensitive responsive element) promoter element. Thus, it is likely that this gene activates leukemia cells, or potentially other cells or cell-types, through the JAK-STAT signal transduction pathway. ISRE is a promoter element found upstream in many genes which are involved in the Jak-STAT pathway. The Jak-STAT pathway is a large, signal transduction pathway involved in the differentiation and proliferation of cells. Therefore, activation of the Jak-STAT pathway, reflected by the binding of the ISRE element, can be used to indicate proteins involved in the proliferation and differentiation of cells.

[0645] Preferred polypeptides of the invention comprise the following amino acid sequence: SCRCWALGAGGGQRQWVGRS (SEQ ID NO:590), TGAQAPKMGARQRKRPLQTRIKNSSKSTLWPPQWVRCGRWWTWPSRKKTSRPRRQLFTSTLSTSASALV WPVSWFSQEGH (SEQ ID NO:591), MGARQRKRPLQTRIKNSSKSTLWPP (SEQ ID NO:592), and/or PRRQLFTSTLSTSASALVWPVSW (SEQ ID NO:593). Polynucleotides encoding these polypeptides are also provided.

[0646] In another embodiment, polypeptides comprising the amino acid sequence of the open reading frame upstream of the predicted signal peptide are contemplated by the present invention. Specifically, polypeptides of the invention comprise the following amino acid sequence: SCRCWALGAGGGQRQWVGRSMPPLAPQLCRAVFLVPILLLLQVKPLNGSPGPKDGSQTEKTPSADQNQE QFEEHFVASSVGEMWQVVDMAQQEEDQSSKTAAVHKHSFHLSFCFSLASVMVFSGGPLRRTFPNIQLCF MLTH (SEQ ID NO:594). Polynucleotides encoding these polypeptides are also provided.

[0647] This gene is expressed primarily in human testes.

[0648] Therefore, polynucleotides and polypeptides of the invention are useful as reagents for differential identification of the tissue(s) or cell type(s) present in a biological sample and for diagnosis of diseases and conditions which include, but are not limited to, reproductive disorders, particularly abnormalities of the testes. Similarly, polypeptides and antibodies directed to these polypeptides are useful in providing immunological probes for differential identification of the tissue(s) or cell type(s). For a number of disorders of the above tissues or cells, particularly of the reproductive system, expression of this gene at significantly higher or lower levels is routinely detected in certain tissues or cell types (e.g., reproductive, testicular, and cancerous and wounded tissues) or bodily fluids (e.g., lymph, serum, plasma, seminal fluid, urine, synovial fluid and spinal fluid) or another tissue or cell sample taken from an individual having such a disorder, relative to the standard gene expression level, i.e., the expression level in healthy tissue or bodily fluid from an individual not having the disorder.

[0649] Preferred polypeptides of the present invention comprise immunogenic epitopes shown in SEQ ID NO: 212 as residues: Leu-26 to Glu-52, Gln-71 to Lys-79. Polynucleotides encoding said polypeptides are also provided.

[0650] The tissue distribution in testes, combined with the detected ISRE biological activity, indicates polynucleotides and polypeptides corresponding to this gene are useful for the diagnosis, treatment, and/or prevention of abnormalities of the testes, such as male infertility and proliferative conditions, and/or could be used as a male contraceptive. Polynucleotides and polypeptides corresponding to this gene are useful for the treatment and diagnosis of conditions concerning proper testicular function (e.g. endocrine function, sperm maturation), as well as cancer. Therefore, this gene product is useful in the treatment of male infertility and/or impotence. This gene product is also useful in assays designed to identify binding agents, as such agents (antagonists) are useful as male contraceptive agents. Similarly, the protein is believed to be useful in the treatment and/or diagnosis of testicular cancer. The testes are also a site of active gene expression of transcripts that is expressed, particularly at low levels, in other tissues of the body. Therefore, this gene product is expressed in other specific tissues or organs where it may play related functional roles in other processes, such as hematopoiesis, inflammation, bone formation, and kidney function, to name a few possible target indications. Protein, as well as, antibodies directed against the protein may show utility as a tumor marker and/or immunotherapy targets for the above listed tissues.

[0651] Many polynucleotide sequences, such as EST sequences, are publicly available and accessible through sequence databases. Some of these sequences are related to SEQ ID NO:88 and may have been publicly available prior to conception of the present invention. Preferably, such related polynucleotides are specifically excluded from the scope of the present invention. To list every related sequence is cumbersome. Accordingly, preferably excluded from the present invention are one or more polynucleotides comprising a nucleotide sequence described by the general formula of a−b, where a is any integer between 1 to 720 of SEQ ID NO:88, b is an integer of 15 to 734, where both a and b correspond to the positions of nucleotide residues shown in SEQ ID NO:88, and where b is greater than or equal to a+14.

[0652] Features of Protein Encoded by Gene No: 79

[0653] This gene is expressed primarily in colon, and to a lesser extent, in thymus.

[0654] Therefore, polynucleotides and polypeptides of the invention are useful as reagents for differential identification of the tissue(s) or cell type(s) present in a biological sample and for diagnosis of diseases and conditions which include, but are not limited to, gastrointestinal, immune, and hematopoietic diseases and/or disorders, particularly abnormalities of the colon, and cancers. Similarly, polypeptides and antibodies directed to these polypeptides are useful in providing immunological probes for differential identification of the tissue(s) or cell type(s). For a number of disorders of the above tissues or cells, particularly of the digestive system, expression of this gene at significantly higher or lower levels is routinely detected in certain tissues or cell types (e.g., gastrointestinal, immune. hematopoietic and cancerous and wounded tissues) or bodily fluids (e.g., lymph, serum, plasma, urine, synovial fluid and spinal fluid) or another tissue or cell sample taken from an individual having such a disorder, relative to the standard gene expression level, i.e., the expression level in healthy tissue or bodily fluid from an individual not having the disorder.

[0655] The tissue distribution in colon and thymus tissue indicates polynucleotides and polypeptides corresponding to this gene are useful for the diagnosis, treatment, and/or prevention of abnormalities of the colon. Representative uses are described in the “Hyperproliferative Disorders” and “Regeneration” sections below and elsewhere herein. The protein can also be used for treating inflammatory conditions, or potentially in modulating immune system activation in the treatment of gastrointestinal disorders. Protein, as well as, antibodies directed against the protein may show utility as a tumor marker and/or immunotherapy targets for the above listed tissues.

[0656] Many polynucleotide sequences, such as EST sequences, are publicly available and accessible through sequence databases. Some of these sequences are related to SEQ ID NO:89 and may have been publicly available prior to conception of the present invention. Preferably, such related polynucleotides are specifically excluded from the scope of the present invention. To list every related sequence is cumbersome. Accordingly, preferably excluded from the present invention are one or more polynucleotides comprising a nucleotide sequence described by the general formula of a−b, where a is any integer between 1 to 1332 of SEQ ID NO:89, b is an integer of 15 to 1346, where both a and b correspond to the positions of nucleotide residues shown in SEQ ID NO:89, and where b is greater than or equal to a+14.

[0657] Features of Protein Encoded by Gene No: 80

[0658] Preferred polypeptides of the invention comprise the following amino acid sequence: DGGGKEEGVSCLKISLLCGPWLWLP (SEQ ID NO:595), HEMGELAICHTRVPFSLPSSAQGVPQNLQGPIGHLAVCTPSSLTSWHFPQKREKWSTVNKRQRFLQFPA PLRNWIPQTPLSLSVSSGPLGSFTVFTLLSLCAWPWCCRDCYKSCCPIPIFNLTAPLCVHTPEPSS (SEQ ID NO:596), SSAQGVPQNLQGPIGHLAVCTPS (SEQ ID NO:597), VNKRQRFLQFPAPLRNWIPQTPLSLSVS (SEQ ID NO:598), CCRDCYKSCCPIPIFNLTAPLCV (SEQ ID NO:599), DLNVTNEGEGKEVLGQGSTNNEKKCQKATSNTEPRAREAKARHANMGTSDRESPTWSLTAEGLKAKSKM QGKATKGAASTMGSHNQGPHKREIFKHETPSSFPPPSQCQPELLPYKYWATLASGYVPSWLPSVDSYRI NTAIKDKNGQDT (SEQ ID NO:600), VLGQGSTNNEKKCQKATSNTEPRA (SEQ ID NO:601), RESPTWSLTAEGLKAKSKMQGKATKGAAS (SEQ ID NO:602), and/or GYVPSWLPSVDSYRINTAIKDK (SEQ ID NO: 603). Polynucleotides encoding these polypeptides are also provided.

[0659] In another embodiment, polypeptides comprising the amino acid sequence of the open reading frame upstream of the predicted signal peptide are contemplated by the present invention. Specifically, polypeptides of the invention comprise the following amino acid sequence: DGGGKEEGVSCLKISLLCGPWLWLPMVLAAPLVAFPCILLFAFSPSAVRD HVGDSRSDVPIFACLALASLALGSVLLVAF (SEQ ID NO:604). Polynucleotides encoding these polypeptides are also provided. The polypeptide of this gene has been determined to have two transmembrane domains at about amino acid position 1-24, and 32-54 of the amino acid sequence referenced in Table 1 for this gene. Based upon these characteristics, it is believed that the protein product of this gene shares structural features to type IIIa membrane proteins.

[0660] This gene is expressed primarily in rhabdomyosarcoma, and to a lesser extent in heart and thymus.

[0661] Therefore, polynucleotides and polypeptides of the invention are useful as reagents for differential identification of the tissue(s) or cell type(s) present in a biological sample and for diagnosis of diseases and conditions which include, but are not limited to, muscle disorders, particularly rhabdomyosarcoma and other proliferative conditions. Similarly, polypeptides and antibodies directed to these polypeptides are useful in providing immunological probes for differential identification of the tissue(s) or cell type(s). For a number of disorders of the above tissues or cells, particularly of the muscular system, expression of this gene at significantly higher or lower levels is routinely detected in certain tissues or cell types (e.g., muscle, and cancerous and wounded tissues) or bodily fluids (e.g., lymph, serum, plasma, urine, synovial fluid and spinal fluid) or another tissue or cell sample taken from an individual having such a disorder, relative to the standard gene expression level, i.e., the expression level in healthy tissue or bodily fluid from an individual not having the disorder.

[0662] Preferred polypeptides of the present invention comprise immunogenic epitopes shown in SEQ ID NO: 214 as residues: Gly-28 to Asp-33. Polynucleotides encoding said polypeptides are also provided.

[0663] The tissue distribution in rhabdomyosarcoma tissue indicates polynucleotides and polypeptides corresponding to this gene are useful for the diagnosis, treatment, and/or prevention of rhabdomyosarcoma. Representative uses are described in the “Hyperproliferative Disorders” and “Regeneration” sections below and elsewhere herein. Moreover, polynucleotides and polypeptides corresponding to this gene are useful for the detection, treatment, and/or prevention of various muscle disorders, such as muscular dystrophy, cardiomyopathy, fibroids, or myomas. The protein can also be used for the amelioration of proliferative conditions in other tissues, including modulation of the immune respone to such tissues. Furthermore, the protein may also be used to determine biological activity, to raise antibodies, as tissue markers, to isolate cognate ligands or receptors, to identify agents that modulate their interactions, in addition to its use as a nutritional supplement. Protein, as well as, antibodies directed against the protein may show utility as a tumor marker and/or immunotherapy targets for the above listed tissues.

[0664] Many polynucleotide sequences, such as EST sequences, are publicly available and accessible through sequence databases. Some of these sequences are related to SEQ ID NO:90 and may have been publicly available prior to conception of the present invention. Preferably, such related polynucleotides are specifically excluded from the scope of the present invention. To list every related sequence is cumbersome. Accordingly, preferably excluded from the present invention are one or more polynucleotides comprising a nucleotide sequence described by the general formula of a−b, where a is any integer between 1 to 984 of SEQ ID NO:90, b is an integer of 15 to 998, where both a and b correspond to the positions of nucleotide residues shown in SEQ ID NO:90, and where b is greater than or equal to a+14.

[0665] Features of Protein Encoded by Gene No: 81

[0666] Preferred polypeptides of the invention comprise the following amino acid sequence LFRCPIGKAGTPAGXGPEFPGRPTRPVREKELTETFE (SEQ ID NO:605), FFVFPYPYPFRPLPPIPFPRFPWFRRNFPIPIPESAPTTPLPSEK (SEQ ID NO:607), PWFRRNFPIPIPESAPTTPLP (SEQ ID NO:608), and/or GKAGTPAGXGPEFPGRPTRPV (SEQ ID NO: 606). Polynucleotides encoding these polypeptides are also provided.

[0667] In another embodiment, polypeptides comprising the amino acid sequence of the open reading frame upstream of the predicted signal peptide are contemplated by the present invention. Specifically, polypeptides of the invention comprise the following amino acid sequence: LFRCPIGKAGTPAGXGPEFPGRPTRPVREKELTETFEMKKVLLLITAILA VAVGFPVSQDQEREKRSISDSDELASGFFVFPYPYPFRPLPPIPFPRFPWFRRNFPIPIPESAPTTPLP SEK (SEQ ID NO:609). Polynucleotides encoding these polypeptides are also provided. The polypeptide of this latter embodiment has been determined to have a transmembrane domain at about amino acid position 35-60 of the amino acid sequence referenced above for this embodiment. Based upon these characteristics, it is believed that the protein product of this gene shares structural features to type II membrane proteins.

[0668] This gene is expressed primarily in Hodgkin's lymphoma.

[0669] Therefore, polynucleotides and polypeptides of the invention are useful as reagents for differential identification of the tissue(s) or cell type(s) present in a biological sample and for diagnosis of diseases and conditions which include, but are not limited to, immune or hematopoietic disorders, particularly Hodgkin's lymphoma. Similarly, polypeptides and antibodies directed to these polypeptides are useful in providing immunological probes for differential identification of the tissue(s) or cell type(s). For a number of disorders of the above tissues or cells, particularly of the immune system, expression of this gene at significantly higher or lower levels is routinely detected in certain tissues or cell types (e.g., immune, hematopoietic, and cancerous and wounded tissues) or bodily fluids (e.g., lymph, serum, plasma, urine, synovial fluid and spinal fluid) or another tissue or cell sample taken from an individual having such a disorder, relative to the standard gene expression level, i.e., the expression level.in healthy tissue or bodily fluid from an individual not having the disorder.

[0670] Preferred polypeptides of the present invention comprise immunogenic epitopes shown in SEQ ID NO: 215 as residues: Ser-21 to Asp-35, Pro-47 to Pro-52, Pro-62 to Asn-67. Polynucleotides encoding said polypeptides are also provided.

[0671] The tissue distribution in Hodgkin's lymphoma tissue indicates polynucleotides and polypeptides corresponding to this gene are useful for the diagnosis, treatment, and/or prevention of Hodgkin's lymphoma. Moreover, polynucleotides and polypeptides corresponding to this gene are useful for the treatment and diagnosis of hematopoietic-related disorders such as anemia, pancytopenia, leukopenia, thrombocytopenia or leukemia since stromal cells are important in the production of cells of hematopoietic lineages. Representative uses are described in the “Immune Activity” and “Infectiou's Disease” sections below, in Example 11, 13, 14, 16, 18, 19, 20, and 27, and elsewhere herein. Briefly, the uses include bone marrow cell ex- vivo culture, bone marrow transplantation, bone marrow reconstitution, radiotherapy or chemotherapy of neoplasia.

[0672] The gene product may also be involved in lymphopoiesis, therefore, it can be used in immune disorders such as infection, inflammation, allergy, immunodeficiency etc. In addition, this gene product may have commercial utility in the expansion of stem cells and committed progenitors of various blood lineages, and in the differentiation and/or proliferation of various cell types. Protein, as well as, antibodies directed against the protein may show utility as a tumor marker and/or immunotherapy targets for the above listed tissues.

[0673] Many polynucleotide sequences, such as EST sequences, are publicly available and accessible through sequence databases. Some of these sequences are related to SEQ ID NO:91 and may have been publicly available prior to conception of the present invention. Preferably, such related polynucleotides are specifically excluded from the scope of the present invention. To list every related sequence is cumbersome. Accordingly, preferably excluded from the present invention are one or more polynucleotides comprising a nucleotide sequence described by the general formula of a−b, where a is any integer between 1 to 552 of SEQ ID NO:91, b is an integer of 15 to 566, where both a and b correspond to the positions of nucleotide residues shown in SEQ ID NO:91, and where b is greater than or equal to a+14

[0674] Features of Protein Encoded by Gene No: 82

[0675] When tested against U937 and K562 cell lines, supernatants removed from cells containing this gene activated both the GAS (gamma activating sequence), and the ISRE (interferon-sensitive responsive element) promoter elements. Thus, it is likely that this gene activates pro-myeloid, leukemic, or more generally, other cells or cell-types, through the JAK-STAT signal transduction pathway. GAS is a promoter element found upstream of many genes which are involved in the Jak-STAT pathway. The Jak-STAT pathway is a large, signal transduction pathway involved in the differentiation and proliferation of cells. Therefore, activation of the Jak-STAT pathway, reflected by the binding of the GAS element, can be used to indicate proteins involved in the proliferation and differentiation of cells. ISRE is,a promoter element found upstream in many genes which are involved in the Jak-STAT pathway. The Jak-STAT pathway is a large, signal transduction pathway involved in the differentiation and proliferation of cells. Therefore, activation of the Jak-STAT pathway, reflected by the binding of the ISRE element, can be used to indicate proteins involved in the proliferation and differentiation of cells. The translation product of this gene was shown to have homology to a conserved trypsin inhibitor which is thought to play an essential role in protein metabolism and regulation (See Genbank Accession No. pir|S35098|S35098).

[0676] Preferred polypeptides of the invention comprise the following amino acid sequence: FYPPMTQGKESLPLLALQIFNTTFRPSFAFFSGHRTLFFGVRSPNPPKPRIFLIWL IAVAL (SEQ ID NO:610), LLALQIFNTTFRPSFAFFSGHRTLFFGVRSP (SEQ ID NO:611), HLAQTVMMHPQKSFYQVKNTNHSDRGAIEET QILEDRLGQIPLCLESQIWEA (SEQ ID NO:612), KNTNHSDRGAIEETQILEDRLGQIPLCL (SEQ ID NO:613), QGCYRRDS NIGRQVRPDSIMLRKPDLGSITHYGSVLGNLNYCDLPQLYRNPSLGNSGMREMFSPFYNPVECHP (SEQ ID NO:614), PDSIMLRKPDLGSITHYGSVLGN (SEQ ID NO:615), and/or YRNPSLGNSGMREMFSPFYNPV (SEQ ID NO: 616). Polynucleotides encoding these polypeptides are also provided.

[0677] This gene is expressed primarily in brain frontal cortex.

[0678] Therefore, polynucleotides,and polypeptides of the invention are useful as reagents for differential identification of the tissue(s) or cell type(s) present in a biological sample and for diagnosis of diseases and conditions which include, but are not limited to, neural disorders, particularly disorders of the central nervous system or endocrine system. Similarly, polypeptides and antibodies directed to these polypeptides are useful in providing immunological probes for differential identification of the tissue(s) or cell type(s). For a number of disorders of the above tissues or cells, particularly of the central nervous system or endocrine system, expression of this gene at significantly higher or lower levels is routinely detected in certain tissues or cell types (e.g., neural, and cancerous and wounded tissues) or bodily fluids (e.g., lymph, serum, plasma, urine, synovial fluid and spinal fluid) or another tissue or cell sample taken from an individual having such a disorder, relative to the standard gene expression level, i.e., the expression level in healthy tissue or bodily fluid from an individual not having the disorder.

[0679] The tissue distribution in brain frontal cortex, combined with the detected GAS and ISRE biological activities indicates polynucleotides and polypeptides corresponding to this gene are useful for diagnosis or treatment of disoders of the central nervous system, caused by trauma, inflammation, demyelination, neoplasia, and degenerative diseases. Additionally, the molecule may function as a neuropeptide or hormone. Moreover, considering the homology to a trypsin inhibitor and its localization in the brain, indicates polynucleotides and polypeptides corresponding to this gene are useful for the detection/treatment of neurodegenerative disease states, behavioral disorders, or inflammatory conditions. Representative uses are described in the “Regeneration” and “Hyperproliferative Disorders” sections below, in Example 11, 15, and 18, and elsewhere herein. Briefly, the uses include, but are not limited to the detection, treatment, and/or prevention of Alzheimer's which include, but are not limited to Alzheimer's Disease, Parkinson's Disease, Huntington's Disease, Tourette Syndrome, meningitis, encephalitis, demyelinating diseases, peripheral neuropathies, neoplasia, trauma, congenital malformations, spinal cord injuries, ischemia and infarction, aneurysms, hemorrhages, schizophrenia, mania, dementia, paranoia, obsessive compulsive disorder, depression, panic disorder, learning disabilities, ALS, psychoses, autism, and altered behaviors, including disorders in feeding, sleep patterns, balance, and perception. In addition, elevated expression of this gene product in regions of the brain indicates that it plays a role in normal neural function.

[0680] Potentially, this gene product is involved in synapse formation, neurotransmission, learning, cognition, homeostasis, or neuronal differentiation or survival. Furthermore, the protein may also be used to determine biological activity, to raise antibodies, as tissue markers, to isolate cognate ligands or receptors, to identify agents that modulate their interactions, in addition to its use as a nutritional supplement. Protein, as well as, antibodies directed against the protein may show utility as a tumor marker and/or immunotherapy targets for the above listed tissues.

[0681] Many polynucleotide sequences, such as EST sequences, are publicly available and accessible through sequence databases. Some of these sequences are related to SEQ ID NO:92 and may have been publicly available prior to conception of the present invention. Preferably, such related polynucleotides are specifically excluded from the scope of the present invention. To list every related sequence is cumbersome. Accordingly, preferably excluded from the present invention are one or more polynucleotides comprising a nucleotide sequence described by the general formula of a−b, where a is any integer between 1 to 1263 of SEQ ID NO:92, b is an integer of 15 to 1277, where both a and b correspond to the positions of nucleotide residues shown in SEQ ID NO:92, and where b is greater than or equal to a+14.

[0682] Features of Protein Encoded by Gene No: 83

[0683] This gene is expressed primarily in synovial fibroblasts.

[0684] Therefore, polynucleotides and polypeptides of the invention are useful as reagents for differential identification of the tissue(s) or cell type(s) present in a biological sample and for diagnosis of diseases and conditions which include, but are not limited to, rheumatoid arthritis. Similarly, polypeptides and antibodies directed to these polypeptides are useful in providing immunological probes for differential identification of the tissue(s) or cell type(s). For a number of disorders of the above tissues or cells, particularly of the immune system, expression of this gene at significantly higher or lower levels is routinely detected in certain tissues or cell types (e.g., immune, cancerous and wounded tissues) or bodily fluids (e.g., serum, plasma, urine, synovial fluid and spinal fluid) or another tissue or cell sample taken from an individual having such a disorder, relative to the standard gene expression level, i.e., the expression level in healthy tissue or bodily fluid from an individual not having the disorder.

[0685] The restricted tissue distribution indicates polynucleotides and polypeptides corresponding to this gene are useful for the treatment and diagnosis of rheumatoid arthritis, since synovial fibroblasts are associated with the synovium and cartilage. In addition, the expression of this gene product in synovium indicates a role in the detection and treatment of disorders and conditions afflicting the skeletal system, in particular osteoporosis as well as disorders afflicting connective tissues (e.g. arthritis, trauma, tendonitis, chrondomalacia and inflammation), such as in the diagnosis or treatment of various autoimmune disorders such as rheumatoid arthritis, lupus, scleroderma, and dermatomyositis as well as dwarfism, spinal deformation, and specific joint abnormalities as well as chondrodysplasias (ie. spondyloepiphyseal dysplasia congenita, familial osteoarthritis, Atelosteogenesis type II, metaphyseal chondrodysplasia type Schmid). Protein, as well as, antibodies directed against the protein may show utility as a tumor marker and/or immunotherapy targets for the above listed tissues.

[0686] Many polynucleotide sequences, such as EST sequences, are publicly available and accessible through sequence databases. Some of these sequences are related to SEQ ID NO:93 and may have been publicly available prior to conception of the present invention. Preferably, such related polynucleotides are specifically excluded from the scope of the present invention. To list every related sequence is cumbersome. Accordingly, preferably excluded from the present invention are one or more polynucleotides comprising a nucleotide sequence described by the general formula of a−b, where a is any integer between 1 to 1556 of SEQ ID NO:93, b is an Integer of 15 to 1570, where both a and b correspond to the positions of nucleotide residues shown in SEQ ID NO:93, and where b is greater than or equal to a+14.

[0687] Features of Protein Encoded by Gene No: 84

[0688] This gene is expressed primarily in ovarian cancer, and to a lesser extent in fetal tissues such as fetal liver and fetal brain.

[0689] Therefore, polynucleotides and polypeptides of the invention are useful as reagents for differential identification of the tissue(s) or cell type(s) present in a biological sample and for diagnosis of diseases and conditions which include, but are not limited to, cancers, particularly of the ovary. Similarly, polypeptides and antibodies directed to these polypeptides are useful in providing immunological probes for differential identification of the tissue(s) or cell type(s). For a number of disorders of the above tissues or cells, particularly of the immune system, expression of this gene at significantly higher or lower levels is routinely detected in certain tissues or cell types (e.g., ovary, fetal, cancerous and wounded tissues) or bodily fluids (e.g., serum, plasma, urine, synovial fluid and spinal fluid) or another tissue or cell sample taken from an individual having such a disorder, relative to the standard gene expression level, i.e., the expression level in healthy tissue or bodily fluid from an individual not having the disorder.

[0690] Preferred polypeptides of the present invention comprise immunogenic epitopes shown in SEQ ID NO: 218 as residues: Pro-28 to Gln-33. Polynucleotides encoding said polypeptides are also provided.

[0691] The tissue distribution in ovarian cancer tissue indicates polynucleotides and polypeptides corresponding to this gene are useful for the treatment and diagnosis of cancers; e.g., ovarian cancer, as well as other tissues where expression has been indicated. Protein, as well as, antibodies directed against the protein may show utility as a tumor marker and/or immunotherapy targets for the above listed tissues.

[0692] Many polynucleotide sequences, such as EST sequences, are publicly available and accessible through sequence databases. Some of these sequences are related to SEQ ID NO:94 and may have been publicly available prior to conception of the present invention. Preferably, such related polynucleotides are specifically excluded from the scope of the present invention. To list every related sequence is cumbersome. Accordingly, preferably excluded from the present invention are one or more polynucleotides comprising a nucleotide sequence described by the general formula of a−b, where a is any integer between 1 to 510 of SEQ ID NO:94, b is an integer of 15 to 524, where both a and b correspond to the positions of nucleotide residues shown in SEQ ID NO:94, and where b is greater than or equal to a+14.

[0693] Features of Protein Encoded by Gene No: 85

[0694] This gene is expressed primarily in testes.

[0695] Therefore, polynucleotides and polypeptides of the invention are useful as reagents for differential identification of the tissue(s) or cell type(s) present in a biological sample and for diagnosis of diseases and conditions which include, but are not limited to, male reproductive or hormonal related disorders. Similarly, polypeptides and antibodies directed to these polypeptides are useful in providing immunological probes for differential identification of the tissue(s) or cell type(s). For a number of disorders of the above tissues or cells, particularly of the male reproductive system, expression of this gene at significantly higher or lower levels is routinely detected in certain tissues or cell types (e.g., testes, cancerous and wounded tissues) or bodily fluids (e.g., serum, plasma, urine, synovial fluid and spinal fluid) or another tissue or cell sample taken from an individual having such a disorder, relative to the standard gene expression level, i.e., the expression level in healthy tissue or bodily fluid from an individual not having the disorder.

[0696] Preferred polypeptides of the present invention comprise immunogenic epitopes shown in SEQ ID NO: 219 as residues: Pro-68 to Asp-73, Gln-92 to Glu-107, Gln-120 to Lys-126. Polynucleotides encoding said polypeptides are also provided.

[0697] The tissue distribution in testes indicates polynucleotides and polypeptides corresponding to this gene are useful for the treatment and diagnosis of male reproductive or hormonal disorders. Furthermore, the tissue distribution indicates that polynucleotides and polypeptides corresponding to this gene are useful for the treatment and diagnosis of conditions concerning proper testicular function (e.g. endocrine function, sperm maturation), as well as cancer. Therefore, this gene product is useful in the treatment of male infertility and/or impotence. This gene product is also useful in assays designed to identify binding, agents, as such agents (antagonists) are useful as male contraceptive agents. Similarly the protein is believed to be useful in the treatment and/or diagnosis of testicular cancer. The testes are also a site of active gene expression of transcripts that is expressed, particularly at low levels, in other tissues of the body. Therefore, this gene product is expressed in other specific tissues or organs where it may play related functional roles in other processes, such as hematopoiesis, inflammation, bone formation, and kidney function, to name a few possible target indications. Protein, as well as, antibodies directed against the protein may show utility as a tissue-specific marker and/or immunotherapy target for the above listed tissues.

[0698] Many polynucleotide sequences, such as EST sequences, are publicly available and accessible through sequence databases. Some of these sequences are related to SEQ ID NO:95 and may have been publicly available prior to conception of the present invention. Preferably, such related polynucleotides are specifically excluded from the scope of the present invention. To list every related sequence is cumbersome. Accordingly, preferably excluded from the present invention are one or more polynucleotides comprising a nucleotide sequence described by the general formula of a−b, where a is any integer between 1 to 1292 of SEQ ID NO:95, b is an integer of 15 to 1306, where both a and b correspond to the positions of nucleotide residues shown in SEQ ID NO:95, and where b is greater than or equal to a+14.

[0699] Features of Protein Encoded by Gene No: 86

[0700] When tested against U937 Myeloid cell lines, supernatants removed from cells containing this gene activated the GAS assay. Thus, it is likely that this gene activates myeloid cells through the Jak-STAT signal transduction pathway. The gamma activating sequence (GAS) is a promoter element found upstream of many genes which are involved in the Jak-STAT pathway. The Jak-STAT pathway is a large, signal transduction pathway involved in the differentiation and proliferation of cells. Therefore, activation of the Jak-STAT pathway, reflected by the binding of the GAS element, can be used to indicate proteins involved in the proliferation and differentiation of cells.

[0701] This gene is expressed primarily in human tonsils.

[0702] Therefore, polynucleotides and polypeptides of the invention are useful as reagents for differential identification of the tissue(s) or cell type(s) present in a biological sample and for diagnosis of diseases and conditions which include, but are not limited to, immune disorders. Similarly, polypeptides and antibodies directed to these polypeptides are useful in providing immunological probes for differential identification of the tissue(s) or cell type(s). For a number of disorders of the above tissues or cells, particularly of the immune system, expression of this gene at significantly higher or lower levels is routinely detected in certain tissues or cell types (e.g., tonsils, cancerous and wounded tissues) or bodily fluids (e.g., serum, plasma, urine, synovial fluid and spinal fluid) or another tissue or cell sample taken from an individual having such a disorder, relative to the standard gene expression level, i.e., the expression level in healthy tissue or bodily fluid from an individual not having the disorder.

[0703] The tissue distribution indicates polynucleotides and polypeptides corresponding to this gene are useful for the diagnosis and treatment of immune disorders. Expression of this gene product in tonsils indicates a role in the regulation of the proliferation; survival; differentiation; and/or activation of potentially all hematopoietic cell lineages, including blood stem cells. This gene product is involved in the regulation of cytokine production, antigen presentation, or other processes that may also suggest a usefulness in the treatment of cancer (e.g. by boosting immune responses).

[0704] Since the gene is expressed in cells of lymphoid origin, the gene or protein, as well as, antibodies directed against the protein may show utility as a tumor marker and/or immunotherapy targets for the above listed tissues. Therefore it is also used as an agent for immunological disorders including arthritis, asthma, immune deficiency diseases such as AIDS, leukemia, rheumatoid arthritis, inflammatory bowel disease, sepsis, acne, and psoriasis. In addition, this gene product may have commercial utility in the expansion of stem cells and committed progenitors of various blood lineages, and in the differentiation and/or proliferation of various cell types. Protein, as well as, antibodies directed against the protein may show utility as a tumor marker and/or immunotherapy targets for the above listed tissues.

[0705] Many polynucleotide sequences, such as EST sequences, are publicly available and accessible through sequence databases. Some of these sequences are related to SEQ ID NO:96 and may have been publicly available prior to conception of the present invention. Preferably, such related polynucleotides are specifically excluded from the scope of the present invention. To list every related sequence is cumbersome. Accordingly, preferably excluded from the present invention are one or more polynucleotides comprising a nucleotide sequence described by the general formula of a−b, where a is any integer between 1 to 1465 of SEQ ID NO:96, b is an integer of 15 to 1479, where both a and b correspond to the positions of nucleotide residues shown in SEQ ID NO:96, and where b is greater than or equal to a+14.

[0706] Features of Protein Encoded by Gene No: 87

[0707] This gene is expressed primarily in human thymus and six week old human embryo.

[0708] Therefore, polynucleotides and polypeptides of the invention are useful as reagents for differential identification of the tissue(s) or cell type(s) present in a biological sample and for diagnosis of diseases and conditions which include, but are not limited to, endocrine diseases and leukemia. Similarly, polypeptides and antibodies directed to these polypeptides are useful in providing immunological probes for differential identification of the tissue(s) or cell type(s). For a number of disorders of the above tissues or cells, particularly of the endocrine and immune systems, expression of this gene at significantly higher or lower levels is routinely detected in certain tissues or cell types (e.g., endocrine, immune, cancerous and wounded tissues) or bodily fluids (e.g., serum, plasma, urine, synovial fluid and spinal fluid) or another tissue or cell sample taken from an individual having such a disorder, relative to the standard gene expression level, i.e., the expression level in healthy tissue or bodily fluid from an individual not having the disorder.

[0709] The tissue distribution in thymus and developing embryonic tissues indicates that polynucleotides and polypeptides corresponding to this gene are useful for the treatment of leukemia or other immune diseases, especially those which are involved in fetal development. Furthermore, the tissue distribution in thymus and developing embryonic tissues indicates that polynucleotides and polypeptides corresponding to this gene are useful for the detection, treatment, and/or prevention of various endocrine disorders and cancers, particularly Addison's Disease, Cushing's Syndrome, and disorders and/or cancers of the pancrease (e.g. diabetes mellitus), adrenal cortex, ovaries, pituitary (e.g., hyper-, hypopituitarism), thyroid (e.g. hyper-, hypothyroidism), parathyroid (e.g. hyper-,hypoparathyroidism) , hypothallamus, and testes. Protein, as well as, antibodies directed against the protein may show utility as a tumor marker and/or immunotherapy targets for the above listed tissues.

[0710] Many polynucleotide sequences, such as EST sequences, are publicly available and accessible through sequence databases. Some of these sequences are related to SEQ ID NO:97 and may have been publicly available prior to conception of the present invention. Preferably, such related polynucleotides are specifically excluded from the scope of the present invention. To list every related sequence is cumbersome. Accordingly, preferably excluded from the present invention are one or more polynucleotides comprising a nucleotide sequence described by the general formula of a−b, where a is any integer between 1 to 1780 of SEQ ID NO:97, b is an integer of 15 to 1794, where both a and b correspond to the positions of nucleotide residues shown in SEQ ID NO:97, and where b is greater than or equal to a+14.

[0711] Features of Protein Encoded by Gene No: 88

[0712] The gene encoding the disclosed cDNA is thought to reside on chromosome 5. Accordingly, polynucleotides related to this invention are useful as a marker in linkage analysis for chromosome 5. Recently another group gened and sequenced this gene, calling it MDC-3.13 isoform I (Genbank Accession Number: g3860095), which is believed to be a cellular factor involved in the differentiation of dendritic cells.

[0713] Preferred polypeptides of the invention comprise the following amino acid sequence: HEAWLRSAGTREPPREQRTRRRQTAQLALQVPAPSRTPPMATDVFNSKNLAVXAQKKILGKMVSKSIAT TLIDDTSSEVLDELYRVTREYTQNKKEAEKIIKNLIKTVIKLAILYRNNQFNQDELALMEKFKKKVHQL AMTVVSFHQVDYTFDRNVLSRLLNECREMLHQIIQRHLTAKSHGRVNNVFDHFSDCEFLAALYNPFGNF KPHLQKLCDGINKMLDEENI (SEQ ID NO:617), HEAWLRSAGTREPPREQRTRRRQTAQLALQVPAPSRTPPMATDVFNSKNLAV (SEQ ID NO:618), XAQKKILGKMVSKSIATTLIDDTSSEVLDELYRVTREYTQNKKEAEKII (SEQ ID NO:619), KNLIKTVIKLAILYRNNQFNQDELALMEKFKKKVHQLAMTVVSFHQVDYTF (SEQ ID NO:620), DRNVLSRLLNECREMLHQIIQRHLTAKSHGRVNNVFDHFSDCEFLAALYNPF (SEQ ID NO:621), and/or GNFKPHLQKLCDGINKMLDEENI (SEQ ID NO:622). Polynucleotides encoding these polypeptides are also provided.

[0714] This gene is expressed primarily in placenta, spleen from CLL patients and various T cell libraries, and to a lesser extent in lung, bone marrow, neutrophil, osteoclastoma, and lymphoma tissues.

[0715] Therefore, polynucleotides and polypeptides of the invention are useful as reagents for differential identification of the tissue(s) or cell type(s) present in a biological sample and for diagnosis of diseases and conditions which include, but are not limited to, diseases of the blood particularly diseases afflicting T cells and tumors of blood cells. Similarly, polypeptides and antibodies directed to these polypeptides are useful in providing immunological probes for differential identification of the tissue(s) or cell type(s). For a number of disorders of the above tissues or cells, particularly of the hematopoeitic system, expression of this gene at significantly higher or lower levels is routinely detected in certain tissues or cell types (e.g., placental, immune, vascular, cancerous and wounded tissues) or bodily fluids (e.g., serum, plasma, urine, synovial fluid and spinal fluid) or another tissue or cell sample taken from an individual having such a disorder, relative to the standard gene expression level, i.e., the expression level in healthy tissue or bodily fluid from an individual not having the disorder.

[0716] The tissue distribution in immune tissues indicates polynucleotides and polypeptides corresponding to this gene are useful for treating diseases of the blood including leukemias, lymphomas and diseases that alter T-cell function or proliferation. Furthermore, the tissue distribution in placenta indicates polynucleotides and polypeptides corresponding to this gene are useful for the diagnosis and/or treatment of disorders of the placenta. Specific expression within the placenta indicates that this gene product may play a role in the proper establishment and maintenance of placental function. Alternately, this gene product is produced by the placenta and then transported to the embryo, where it may play a crucial role in the development and/or survival of the developing embryo or fetus. Expression of this gene product in a vascular-rich tissue such as the placenta also indicates that this gene product is produced more generally in endothelial cells or within the circulation. In such instances, it may play more generalized roles in vascular function, such as in angiogenesis. It may also be produced in the vasculature and have effects on other cells within the circulation, such as hematopoietic cells. It may serve to promote the proliferation, survival, activation, and/or differentiation of hematopoietic cells, as well as other cells throughout the body. Protein, as well as, antibodies directed against the protein may show utility as a tumor marker and/or immunotherapy targets for the above listed tissues.

[0717] Many polynucleotide sequences, such as EST sequences, are publicly available and accessible through sequence databases. Some of these sequences are related to SEQ ID NO:98 and may have been publicly available prior to conception of the present invention. Preferably, such related polynucleotides are specifically excluded from the scope of the present invention. To list every related sequence is cumbersome. Accordingly, preferably excluded from the present invention are one or more polynucleotides comprising a nucleotide sequence described by the general formula of a−b, where a is any integer between 1 to 1929 of SEQ ID NO:98, b is an integer of 15 to 1943, where both a and b correspond to the positions of nucleotide residues shown in SEQ ID NO:98, and where b is greater than or equal to a+14.

[0718] Features of Protein Encoded by Gene No: 89

[0719] This gene is expressed primarily in rejected kidney, placenta, and melanocytes.

[0720] Therefore, polynucleotides and polypeptides of the invention are useful as reagents for differential identification of the tissue(s) or cell type(s) present in a biological sample and for diagnosis of diseases and conditions which include, but are not limited to, acute or chronic renal failure. Similarly, polypeptides and antibodies directed to these polypeptides are useful in providing immunological probes for differential identification of the tissue(s) or cell type(s). For a number of disorders of the above tissues or cells, particularly of the renal system, expression of this gene at significantly higher or lower levels is routinely detected in certain tissues or cell types (e.g., renal, placental, cancerous and wounded tissues) or bodily fluids (e.g., serum, plasma, urine, synovial fluid and spinal fluid) or another tissue or cell sample taken from an individual having such a disorder, relative to the standard gene expression level, i.e., the expression level in healthy tissue or bodily fluid from an individual not having the disorder.

[0721] Preferred polypeptides of the present invention comprise immunogenic epitopes shown in SEQ ID NO: 223 as residues: Thr-41 to Pro-47. Polynucleotides encoding said polypeptides are also provided.

[0722] The tissue distribution in kidney indicates polynucleotides and polypeptides corresponding to this gene are useful for treating diseases of the kidney, including renal failure of either an acute or chronic nature, as well as nephritus, renal tubular acidosis, proteinuria, pyuria, edema, pyelonephritis, hydronephritis, nephrotic syndrome, crush syndrome, glomerulonephritis, hematuria, renal colic and kidney stones, in addition to Wilms Tumor Disease, and congenital kidney abnormalities such as horseshoe kidney, polycystic kidney, and Falconi's syndrome. Protein, as well as, antibodies directed against the protein may show utility as a tumor marker and/or immunotherapy targets for the above listed tissues.

[0723] Many polynucleotide sequences, such as EST sequences, are publicly available and accessible through sequence databases. Some of these sequences are related to SEQ ID NO:99 and may have been publicly available prior to conception of the present invention. Preferably, such related polynucleotides are specifically excluded from the scope of the present invention. To list every related sequence is cumbersome. Accordingly, preferably excluded from the present invention are one or more polynucleotides comprising a nucleotide sequence described by the general formula of a−b, where a is any integer between 1 to 1580 of SEQ ID NO:99, b is an integer of 15 to 1594, where both a and b correspond to the positions of nucleotide residues shown in SEQ ID NO:99, and where b is greater than or equal to a+14.

[0724] Features of Protein Encoded by Gene No: 90

[0725] When tested against U937 Myeloid cell lines, supernatants removed from cells containing this gene activated the GAS assay. Thus, it is likely that this gene activates myeloid cells through the Jak-STAT signal transduction pathway. The gamma activating sequence (GAS) is a promoter element found upstream of many genes which are involved in the Jak-STAT pathway. The Jak-STAT pathway is a large, signal transduction pathway involved in the differentiation and proliferation of cells. Therefore, activation of the Jak-STAT pathway, reflected by, the binding of the GAS element, can be used to indicate proteins involved in the proliferation and differentiation of cells.

[0726] This gene is expressed primarily in spinal cord, and to a lesser extent in melanocytes and fetal spleen/liver.

[0727] Therefore, polynucleotides and polypeptides of the invention are useful as reagents for differential identification of the tissue(s) or cell type(s) present in a biological sample and for diagnosis of diseases and conditions which include, but are not limited to, central nervous system diseases. Similarly, polypeptides and antibodies directed to these polypeptides are useful in providing immunological probes for differential identification of the tissue(s) or cell type(s). For a number of disorders of the above tissues or cells, particularly of the central nervous system, expression of this gene at significantly higher or lower levels is routinely detected in certain tissues or cell types (e.g., central nervous system, cancerous and wounded tissues) or bodily fluids (e.g., serum, plasma, urine, synovial fluid and spinal fluid) or another tissue or cell sample taken from an individual having such a disorder, relative to the standard gene expression level, i.e., the expression level in healthy tissue or bodily fluid from an individual not having the disorder.

[0728] The tissue distribution in spinal cord tissue indicates polynucleotides and polypeptides corresponding to this gene are useful for the diagnosis and treatment of central nervous system disorders, such as Alzheimer's Disease, Parkinson's Disease, Huntington's Disease, Tourette Syndrome, schizophrenia, mania, dementia, paranoia, obsessive compulsive disorder, panic disorder, learning disabilities, ALS, psychoses, autism, and altered behaviors, including disorders in feeding, sleep patterns, balance, and perception. In addition, the gene or gene product may also play a role in the treatment and/or detection of developmental disorders associated with the developing embryo, or sexually-linked disorders. Protein. as well as, antibodies directed against the protein may show utility as a tumor marker and/or immunotherapy targets for the above listed tissues.

[0729] Many polynucleotide sequences, such as EST sequences, are publicly available and accessible through sequence databases. Some of these sequences are related to SEQ ID NO:100 and may have been publicly available prior to conception of the present invention. Preferably, such related polynucleotides are specifically excluded from the scope of the present invention. To list every related sequence is cumbersome. Accordingly, preferably excluded from the present invention are one or more polynucleotides comprising a nucleotide sequence described by the general formula of a−b, where a is any integer between 1 to 1728 of SEQ ID NO: 100, b is an integer of 15 to 1742, where both a and b correspond to the positions of nucleotide residues shown in SEQ ID NO: 100, and where b is greater than or equal to a+14.

[0730] Features of Protein Encoded by Gene No: 91

[0731] This gene is expressed primarily in breast and dendritic cells.

[0732] Therefore, polynucleotides and polypeptides of the invention are useful as reagents for differential identification of the tissue(s) or cell type(s) present in a biological sample and for diagnosis of diseases and conditions which include, but are not limited to, breast related disorders and inflammatory diseases. Similarly, polypeptides and antibodies directed to these polypeptides are useful in providing immunological probes for differential identification of the tissue(s) or cell type(s). For a number of disorders of the above tissues or cells, particularly of the breast tissue and dendritic cells, expression of this gene at significantly higher or lower levels is routinely detected in certain tissues or cell types (e.g., breast, immune, cancerous and wounded tissues) or bodily fluids (e.g., serum, plasma, urine, synovial fluid and spinal fluid) or another tissue or cell sample taken from an individual having such a disorder, relative to the standard gene expression level, i.e., the expression level in healthy tissue or bodily fluid from an individual not having the disorder.

[0733] The tissue distribution in breast indicates polynucleotides and polypeptides corresponding to this gene are useful for the diagnosis and treatment of breast related diseases and inflammatory disorders. Furthermore, the tissue distribution in breast indicates polynucleotides and polypeptides corresponding to this gene are useful for the diagnosis and intervention of breast tumors, in addition to other tumors where expression has been indicated. Protein, as well as, antibodies directed against the protein may show utility as a tissue-specific marker and/or immunotherapy target for the above listed tissues.

[0734] Many polynucleotide sequences, such as EST sequences, are publicly available and accessible through sequence databases. Some of these sequences are related to SEQ ID NO: 101 and may have been publicly available prior to conception of the present invention. Preferably, such related polynucleotides are specifically excluded from the scope of the present invention. To list every related sequence is cumbersome. Accordingly, preferably excluded from the present invention are one or more polynucleotides comprising a nucleotide sequence described by the general formula of a−b, where a is any integer between 1 to 1487 of SEQ ID NO:101, b is an integer of 15 to 1501, where both a and b correspond to the positions of nucleotide residues shown in SEQ ID NO: 101, and where b is greater than or equal to a+14.

[0735] Features of Protein Encoded by Gene No: 92

[0736] When tested against sensory neuron cell lines, supernatants removed from cells containing this gene activated the EGRI assay. Thus, it is likely that this gene activates neuronal cells through a signal transduction pathway. Early growth response 1 (EGR1) is a promoter associated with certain genes that induces various tissues and cell types upon activation, leading the cells to undergo differentiation and proliferation. Furthermore, when tested against both Jurkat T-cells and U937 Myeloid cell lines, supernatants removed from cells containing this gene activated the GAS assay. Thus, it is likely that this gene activates both T-cells and myeloid cells through the Jak-STAT signal transduction pathway. The gamma activating sequence (GAS) is a promoter element found upstream of many genes which are involved in the Jak-STAT pathway. The Jak-STAT pathway is a large, signal transduction pathway involved in the differentiation and proliferation of cells. Therefore, activation of the Jak-STAT pathway, reflected by the binding of the GAS element, can be used to indicate proteins involved in the proliferation and differentiation of cells.

[0737] This gene is expressed primarily in synovial sarcoma.

[0738] Therefore, polynucleotides and polypeptides of the invention are useful as reagents for differential identification of the tissue(s) or cell type(s) present in a biological sample and for diagnosis of diseases and conditions which include, but are not limited to, synovial sarcoma. Similarly, polypeptides and antibodies directed to these polypeptides are useful in providing immunological probes for differential identification of the tissue(s) or cell type(s). For a number of disorders of the above tissues or cells, particularly of the synovial sarcoma, expression of this gene at significantly higher or lower levels is routinely detected in certain tissues or cell types (e.g., synovium, cancerous and wounded tissues) or bodily fluids (e.g., serum, plasma, urine, synovial fluid and spinal fluid) or another tissue or cell sample taken from an individual having such a disorder, relative to the standard gene expression level, i.e., the expression level in healthy tissue or bodily fluid from an individual not having the disorder.

[0739] The tissue distribution in synovial sarcoma, and the biological activity data, suggest that polynucleotides and polypeptides corresponding to this gene are useful for the diagnosis and treatment of synovial sarcoma. In general, the expression of this gene product in synovium indicates a role in the detection and treatment of disorders and conditions afflicting the skeletal system, in particular osteoporosis as well as disorders afflicting connective tissues (e.g. arthritis, trauma, tendonitis, chrondomalacia and inflammation), such as in the diagnosis or treatment of various autoimmune disorders such as rheumatoid arthritis, lupus, scleroderma, and dermatomyositis as well as dwarfism, spinal deformation, and specific joint abnormalities as well as chondrodysplasias (ie. spondyloepiphyseal dysplasia congenita, familial osteoarthritis, Atelosteogenesis type II, metaphyseal chondrodysplasia type Schmid). Protein, as well as, antibodies directed against the protein may show utility as a tumor marker and/or immunotherapy targets for the above listed tissues.

[0740] Many polynucleotide sequences, such as EST sequences, are publicly available and accessible through sequence databases. Some of these sequences are related to SEQ ID NO:102 and may have been publicly available prior to conception of the present invention. Preferably, such related polynucleotides are specifically excluded from the scope of the present invention. To list every related sequence is cumbersome. Accordingly, preferably excluded from the present invention are one or more polynucleotides comprising a nucleotide sequence described by the general formula of a−b, where a is any integer between 1 to 777 of SEQ ID NO:102, b is an integer of 15 to 791, where both a and b correspond to the positions of nucleotide residues shown in SEQ ID NO:102, and where b is greater than or equal to a+14.

[0741] Features of Protein Encoded by Gene No: 93

[0742] The translation product of this gene was found to have homology to a zinc finger protein from Mus musculus (See Genbank Accession No. gn1|PID|e225687) which is thought to be involved in the modulation of gene regulation.

[0743] Preferred polypeptides of the invention comprise the following amino acid sequence: NSARGLSGGHPFPWLSEGHPF (SEQ ID NO:623), TDSDLTLGILLLGIYTNHIWEMFLAASRINSPKLEPEKSVKRQINFPSSKDVGCSLEVPKDGPPLSHGK EWIPLSHRKGWIPLSHMKGWPSLSHGKGWPP LSPRAEF (SEQ ID NO:624), LGILLLGIYTNHIWEMFLAA (SEQ ID NO:625), KSVKRQINFPSSKDVGCSLEVPKDGPP (SEQ ID NO:626), GKEWIPLSHRKGWIPLSHMKGWPSLSH (SEQ ID NO:627), GWASTQPRERMDPAQPQERMDPSQPHERMALTQPWKRMAP TQPSCRI (SEQ ID NO:628), and/or PAQPQERMDPSQPHERMALTQPWK (SEQ ID NO:629). Polynucleotides encoding these polypeptides are also provided.

[0744] In another embodiment, polypeptides comprising the amino acid sequence of the open reading frame upstream of the predicted signal peptide are contemplated by the present invention. Specifically, polypeptides of the invention comprise the following amino acid sequence: NSARGLSGGHPFPWLSEGHPFMWLRGIHPFLWLSGIHSFPWLSGGPSLGTSSEQPTSLEDGKLICLFTD FSGSSFGLFMREAAKNISQM (SEQ ID NO:630). Polynucleotides encoding these polypeptides are also provided.

[0745] This gene is expressed primarily in neutrophils.

[0746] Therefore, polynucleotides and polypeptides of the invention are useful as reagents for differential identification of the tissue(s) or cell type(s) present in a biological sample and for diagnosis of diseases and conditions which include, but are not limited to, immune or hematopoietic diseases and/or disorders. Similarly, polypeptides and antibodies directed to these polypeptides are useful in providing immunological probes for differential identification of the tissue(s) or cell type(s). For a number of disorders of the above tissues or cells, particularly of the immune system, expression of this gene at significantly higher or lower levels is routinely detected in certain tissues or cell types (e.g., immune, hematopoietic cancerous and wounded tissues) or bodily fluids (e.g., lymph, serum, plasma, urine, synovial fluid and spinal fluid) or another tissue or cell sample taken from an individual having such a disorder, relative to the standard gene expression level, i.e., the expression level in healthy tissue or bodily fluid from an individual not having the disorder.

[0747] Preferred polypeptides of the present invention comprise immunogenic epitopes shown in SEQ ID NO: 227 as residues: Ser-30 to Asp-39. Polynucleotides encoding said polypeptides are also provided.

[0748] The tissue distribution in neutrophils indicates polynucleotides and polypeptides corresponding to this gene are useful for the diagnosis, treatment, and/or prevention of immune disorders involving neutrophils, including neutropenia. Representative uses are described in the “Immune Activity” and “Infectiou's Disease” sections below, in Example 11, 13, 14, 16, 18, 19, 20, and 27, and elsewhere herein. Briefly, the expression of this gene product indicates a role in regulating the proliferation; survival; differentiation; and/or activation of hematopoietic cell lineages, including blood stem cells. This gene product is involved in the regulation of cytokine production, antigen presentation, or other processes that may also suggest a usefulness in the treatment of cancer (e.g. by boosting immune responses).

[0749] Since the gene is expressed in cells of lymphoid origin, the natural gene product is involved in immune functions. Therefore it is also used as an agent for immunological disorders including arthritis, asthma, immunodeficiency diseases such as AIDS, leukemia, rheumatoid arthritis granulomatou's Disease, inflammatory bowel disease. sepsis. acne, neutropenia, neutrophilia, psoriasis, hypersensitivities, such as T-cell mediated cytotoxicity; immune reactions to transplanted organs and tissues, such as host-versus-graft and graft-versus-host diseases, or autoimmunity disorders, such as autoimmune infertility, lense tissue injury, demyelination, systemic lupus erythematosis, drug induced hemolytic anemia, rheumatoid arthritis, Sjogren's Disease, scleroderma and tissues. In addition, this gene product may have commercial utility in the expansion of stem cells and committed progenitors of various blood lineages, and in the differentiation and/or proliferation of various cell types. The protein product of this gene can be used in the preparation of therapeutic compositions, for treating, preventing or delaying the recurrence of a tumour or neuronal disorders, e.g. genetic diseases or acquired degenerative encephalopathies such as Alzheimer's Disease.

[0750] Moreover, the protein is also useful in the induction or inhibition of cellular apoptosis resulting in inhibition of tumour cell growth, to suppress tumour formation, to induce G1 arrest of the cell cycle and to act as a nuclear transcription factor. Furthermore, the protein may also be used to determine biological activity, to raise antibodies, as tissue markers, to isolate cognate ligands or receptors, to identify agents that modulate their interactions, in addition to its use as a nutritional supplement. Protein, as well as, antibodies directed against the protein may show utility as a tumor marker and/or immunotherapy targets for the above listed tissues.

[0751] Many polynucleotide sequences, such as EST sequences, are publicly available and accessible through sequence databases. Some of these sequences are related to SEQ ID NO:103 and may have been publicly available prior to conception of the present invention. Preferably, such related polynucleotides are specifically excluded from the scope of the present invention. To list every related sequence is cumbersome. Accordingly, preferably excluded from the present invention are one or more polynucleotides comprising a nucleotide sequence described by the general formula of a−b, where a is any integer between 1 to 428 of SEQ ID NO: 103, b is an integer of 15 to 442, where both a and b correspond to the positions of nucleotide residues shown in SEQ ID NO: 103, and where b is greater than or equal to a+14.

[0752] Features of Protein Encoded by Gene No: 94

[0753] When tested against U937 and K562 cell lines, supernatants removed from cells containing this gene activated both the GAS (gamma activating sequence), and the ISRE (interferon-sensitive responsive element) promoter elements. Thus, it is likely that this gene activates pro-myeloid, leukemic, or more generally, other cells or cell-types, through the JAK-STAT signal transduction pathway. GAS is a promoter element found upstream of many genes which are involved in the Jak-STAT pathway.

[0754] The Jak-STAT pathway is a large, signal transduction pathway involved in the differentiation and proliferation of cells. Therefore, activation of the Jak-STAT pathway, reflected by the binding of the GAS element, can be used to indicate proteins involved in the proliferation and differentiation of cells. ISRE is a promoter element found upstream in many genes which are involved in the Jak-STAT pathway. The Jak-STAT pathway is a large, signal transduction pathway involved in the differentiation and proliferation of cells. Therefore, activation of the Jak-STAT pathway, reflected by the binding of the ISRE element, can be used to indicate proteins involved in the proliferation and differentiation of cells. The protein product of this gene was found to have homology to the G-protein coupled receptor TM1 long consensus polypeptide (See Genbank Accession No. R50790) which indicates the protein is useful in the modulation of signalling events, cell-cycle regulation and/or transcriptional regulation.

[0755] Preferred polypeptides of the invention comprise the following amino acid sequence: IANGGGRPIKLNALYKIQNECKIVFTCIDF (SEQ ID NO:631), and/or MPCIKSKMNAKLFSLVLTLCCMIPISVLFGTCI (SEQ ID NO:632). Polynucleotides encoding these polypeptides are also provided.

[0756] In another embodiment, polypeptides comprising the amino acid sequence of the open reading frame upstream of the predicted signal peptide are contemplated by the present invention. Specifically, polypeptides of the invention comprise the following amino acid sequence: IANGGGRPIKLNALYKIQNECKIVFTCIDFMLYDSNLCSVWHLYLILHLCKTFVYCGCVHSSYLISGTV NTQYFIVQTVLLF (SEQ ID NO: 633). Polynucleotides encoding these polypeptides are also provided.

[0757] The gene encoding the disclosed cDNA is believed to reside on chromosome 1. Accordingly, polynucleotides related to this invention are useful as a marker in linkage analysis for chromosome 1.

[0758] This gene is expressed primarily in duodenum.

[0759] Therefore, polynucleotides and polypeptides of the invention are useful as reagents for differential identification of the tissue(s) or cell type(s) present in a biological sample and for diagnosis of diseases and conditions which include, but are not limited to, gastrointestinal diorders, particularly abnormalities of the duodenum. Similarly, polypeptides and antibodies directed to these polypeptides are useful in providing immunological probes for differential identification of the tissue(s) or cell type(s). For a number of disorders of the above tissues or cells, particularly of the digestive system, expression of this gene at significantly higher or lower levels is routinely detected in certain tissues or cell types (e.g., gastrointestinal, immune, hematopoietic, and cancerous and wounded tissues) or bodily fluids (e.g., lymph, serum, plasma, urine, synovial fluid and spinal fluid) or another tissue or cell sample taken from an individual having such a disorder, relative to the standard gene expression level, i.e., the expression level in healthy tissue or bodily fluid from an individual not having the disorder.

[0760] The tissue distribution in duodenum, the homology to the TM1 g-protein coupled receptor consensus sequence, in addition to the detected GAS and ISRE biological activities, indicates polynucleotides and polypeptides corresponding to this gene are useful for the diagnosis, treatment, and/or prevention of the abnormalities of the duodenum, particularly proliferative conditions such as cancers. Moreover, the protein can be used in G-protein coupled receptor ligand binding assays. The assay can be used to identify fragments from GPR proteins (see Genseq Accession Nos. R48686-R48758 for examples) which retain biological activity such as binding a GPR ligand or modulating GPR ligand binding to a GPR (see Genseq Accession Nos. R48759-R48758, R50569-R50807 and R89189-R89195 for examples of polypeptide fragments). The polypeptide fragments can be used in compositions for treating subjects suffering from a pathology related to a GPR abnormality e.g. a psychotic disorder such as schizophrenia.

[0761] The secreted protein can also be used to determine biological activity, to raise antibodies, as tissue markers, to isolate cognate ligands or receptors, to identify agents that modulate their interactions, and as nutritional supplements. It may also have a very wide range of biological activities. Representative uses are described in the “Chemotaxis” and “Binding Activity” sections below, in Examples 11, 12, 13, 14, 15, 16, 18, 19, and 20, and elsewhere herein. Briefly, the protein may possess the following activities: cytokine, cell proliferation/differentiation modulating activity or induction of other cytokines; immunostimulating/immunosuppressant activities (e.g. for treating human immunodeficiency virus infection, cancer, autoimmune diseases and allergy); regulation of hematopoiesis (e.g. for treating anemia or as adjunct to chemotherapy); stimulation or growth of bone, cartilage, tendons, ligaments and/or nerves (e.g. for treating wounds, stimulation of follicle stimulating hormone (for control of fertility); chemotactic and chemokinetic activities (e.g. for treating infections, tumors); hemostatic or thrombolytic activity (e.g. for treating hemophilia, cardiac infarction etc.); anti-inflammatory activity (e.g. for treating septic shock, Crohn's Disease); as antimicrobials; for treating psoriasis or other hyperproliferative diseases; for regulation of metabolism, and behavior. Also contemplated is the use of the corresponding nucleic acid in gene therapy procedures. Furthermore, the protein may also be used to determine biological activity, to raise antibodies, as tissue markers, to isolate cognate ligands or receptors, to identify agents that modulate their interactions, in addition to its use as a nutritional supplement. Protein, as well as, antibodies directed against the protein may show utility as a tumor marker and/or immunotherapy targets for the above listed tissues. All references available through the accessions referenced above, in addition to the material contained within the accessions themselves, are hereby incorporated herein by reference.

[0762] Many polynucleotide sequences, such as EST sequences, are publicly available and accessible through sequence databases. Some of these sequences are related to SEQ ID NO:104 and may have been publicly available prior to conception of the present invention. Preferably, such related polynucleotides are specifically excluded from the scope of the present invention. To list every related sequence is cumbersome. Accordingly, preferably excluded from the present invention are one or more polynucleotides comprising a nucleotide sequence described by the general formula of a−b, where a is any integer between 1 to 876 of SEQ ID NO: 104, b is an integer of 15 to 890, where both a and b correspond to the positions of nucleotide residues shown in SEQ ID NO:104, and where b is greater than or equal to a+14.

[0763] Features of Protein Encoded by Gene No: 95

[0764] The translation product of this gene shares sequence homology with a growth and transformation dependent protein (>gi|207250), which is thought to be important in the regulation of cellular growth and proliferation.

[0765] Preferred polypeptides of the invention comprise the following amino acid sequence: QVAMGSLSGLRLAAGSCFRLCERDVSSSLRLTRSSDLKRINGFCTKPQESPGAPSRTYNRVPLHKPTDW QKKILIWSGRFKKEDEIPETVSLEMLDAAKNK (SEQ ID NO:634), GLRLAAGSCFRLCERDVSSSLRLTR (SEQ ID NO:635), APSRTYNRVPLHKPTDWQKK (SEQ ID NO:636), IWSGRFKKEDEIPETVSLEMLDA (SEQ ID NO:637), MDFAQNHRKVPELHPALTTECLYTNLRIGRKRSSYGQVASKRKMKSQRLSRWRCLMLQRTRCE (SEQ ID NO:638), KVPELHPALTTECLYTNLR (SEQ ID NO:639), KRSSYGQVASKRKMKSQRLSRWRCLM (SEQ ID NO:640), INGFCTKPQESP (SEQ ID NO:641), RVPLHKPTD (SEQ ID NO:642), WSGRFKKE (SEQ ID NO:643), EMLDAAKNK (SEQ ID NO:644), SYLMIALTV (SEQ ID NO:645), and/or MVIEGKKAA (SEQ ID NO:646). Polynucleotides encoding these polypeptides are also provided. The polypeptide of this gene has been determined to have a transmembrane domain at about amino acid position 3-26 of the amino acid sequence referenced in Table 1 for this gene. Moreover, a cytoplasmic tail encompassing amino acids 1-5 of this protein has also been determined. Based upon these characteristics, it is believed that the protein product of this gene shares structural features to type II membrane proteins.

[0766] In another embodiment, polypeptides comprising the amino acid sequence of the open reading frame upstream of the predicted signal peptide are contemplated by the present invention. Specifically, polypeptides of the invention comprise the following amino acid sequence: QVAMGSLSGLRLAAGSCFRLCERDVSSSLRLTRSSDLKRINGFCTKPQESPGAPSRTYNRVPLHKPTDW QKKILIWSGRFKKEDEIPETVSLEMLDAAKNKMRVKISYLMIALTVVGCIFMVIEGKKAQRHETLTSL NLEKKARLKEEAAMKAKTE (SEQ ID NO:647). Polynucleotides encoding these polypeptides are also provided.

[0767] This gene is expressed primarily in ovary.

[0768] Therefore, polynucleotides and polypeptides of the invention are useful as reagents for differential identification of the tissue(s) or cell type(s) present in a biological sample and for diagnosis of diseases and conditions which include, but are not limited to, reproductive, or endocrine disorders, particularly abnormalities of the ovary. Similarly, polypeptides and antibodies directed to these polypeptides are useful in providing immunological probes for differential identification of the tissue(s) or cell type(s). For a number of disorders of the above tissues or cells, particularly of the reproductive system, expression of this gene at significantly higher or lower levels is routinely detected in certain tissues or cell types (e.g., reproductive, endocrine, and cancerous and wounded tissues) or bodily fluids (e.g., lymph, serum, plasma, urine, synovial fluid and spinal fluid) or another tissue or cell sample taken from an individual having such a disorder, relative to the standard gene expression level, i.e., the expression level in healthy tissue or bodily fluid from an individual not having the disorder.

[0769] Preferred polypeptides of the present invention comprise immunogenic epitopes shown in SEQ ID NO: 229 as residues: Lys-25 to Thr-33, Leu-39 to Glu-47. Polynucleotides encoding said polypeptides are also provided.

[0770] The tissue distribution in ovary, combined with the homology to the growth and transformation dependent protein, indicates polynucleotides and polypeptides corresponding to this gene are useful for the diagnosis, treatment, and/or prevention of the abnormalities of the ovary such as ovarian cancer. The protein can also be used to determine biological activity, to raise antibodies, as tissue markers, to isolate cognate ligands or receptors, to identify agents that modulate their interactions, and as nutritional supplements. It may also have a very wide range of biological activities. Representative uses are described in the “Chemotaxis” and “Binding Activity” sections below, in Examples 11, 12, 13, 14, 15, 16, 18, 19, and 20, and elsewhere herein. Briefly, the protein may possess the following activities: cytokine, cell proliferation/differentiation modulating activity or induction of other cytokines; immunostimulating/immunosuppressant activities (e.g. for treating human immunodeficiency virus infection, cancer, autoirmune diseases and allergy); regulation of hematopoiesis (e.g. for treating anemia or as adjunct to chemotherapy); stimulation or growth of bone, cartilage, tendons, ligaments and/or nerves (e.g. for treating wounds, stimulation of follicle stimulating hormone (for control of fertility); chemotactic and chemokinetic activities (e.g. for treating infections, tumors); hemostatic or thrombolytic activity (e.g. for treating hemophilia, cardiac infarction etc.); anti-inflammatory activity (e.g. for treating septic shock, Crohn's Disease); as antimicrobials; for treating psoriasis or other hyperproliferative diseases; for regulation of metabolism, and behavior.

[0771] Also contemplated is the use of the corresponding nucleic acid in gene therapy procedures. Furthermore, the protein may also be used to determine biological activity, to raise antibodies, as tissue markers, to isolate cognate ligands or receptors, to identify agents that modulate their interactions, in addition to its use as a nutritional supplement. Protein, as well as, antibodies directed against the protein may show utility as a tumor marker and/or immunotherapy targets for the above listed tissues.

[0772] Many polynucleotide sequences, such as EST sequences, are publicly available and accessible through sequence databases. Some of these sequences are related to SEQ ID NO:105 and may have been publicly available prior to conception of the present invention. Preferably, such related polynucleotides are specifically excluded from the scope of the present invention. To list every related sequence is cumbersome. Accordingly, preferably excluded from the present invention are one or more polynucleotides comprising a nucleotide sequence described by the general formula of a−b, where a is any integer between 1 to 723 of SEQ ID NO:105, b is an integer of 15 to 737, where both a and b correspond to the positions of nucleotide residues shown in SEQ ID NO:105, and where b is greater than or equal to a+14.

[0773] Features of Protein Encoded by Gene No: 96

[0774] This gene is expressed primarily in adult pulmonary tissue.

[0775] Therefore, polynucleotides and polypeptides of the invention are useful as reagents for differential identification of the tissue(s) or cell type(s) present in a biological sample and for diagnosis of diseases and conditions which include, but are not limited to, diseases of the cardiopulmonary system including asthma, bronchitis, apnea, enlarged heart, arythmia, strokes and heart attacks. Similarly, polypeptides and antibodies directed to these polypeptides are useful in providing immunological probes for differential identification of the tissue(s) or cell type(s). For a number of disorders of the above tissues or cells, particularly of the cardiopulmonary system, expression of this gene at significantly higher or lower levels is routinely detected in certain tissues or cell types (e.g., pulmonary, cancerous and wounded tissues) or bodily fluids (e.g., serum, plasma, urine, synovial fluid and spinal fluid) or another tissue or cell sample taken from an individual having such a disorder, relative to the standard gene expression level, i.e., the expression level in healthy tissue or bodily fluid from an individual not having the disorder.

[0776] Preferred polypeptides of the present invention comprise immunogenic epitopes shown in SEQ ID NO: 230 as residues: Pro-27 to Leu-41. Polynucleotides encoding said polypeptides are also provided.

[0777] The tissue distribution in pulmonary tissues indicates polynucleotides and polypeptides corresponding to this gene are useful for the treatment or diagnosis of diseases such as arythmia, apnea, asthma and possibly for the early detection and prevention of patients likely to have strokes or heart attacks. Furthermore, the tissue distribution in pulmonary tissues indicates polynucleotides and polypeptides corresponding to this gene are useful for the detection and treatment of disorders associated with developing lungs, particularly in premature infants where the lungs are the last tissues to develop. Additionally, the tissue distribution indicates polynucleotides and polypeptides corresponding to this gene are useful for the diagnosis and intervention of lung tumors. Protein, as well as, antibodies directed against the protein may show utility as a tumor marker and immunotherapy targets for the above listed tumors and tissues.

[0778] Many polynucleotide sequences, such as EST sequences, are publicly available and accessible through sequence databases. Some of these sequences are related to SEQ ID NO:106 and may have been publicly available prior to conception of the present inventions Preferably, such related polynucleotides are specifically excluded from the scope of the present invention. To list every related sequence is cumbersome. Accordingly, preferably excluded from the present invention are one or more polynucleotides comprising a nucleotide sequence described by the general formula of a−b, where a is any integer between 1 to 1266 of SEQ ID NO:106, b is an integer of 15 to 1280, where both a and b correspond to the positions of nucleotide residues shown in SEQ ID NO:106, and where b is greater than or equal to a+14.

[0779] Features of Protein Encoded by Gene No: 97

[0780] When tested against K562 leukemia cell lines, supernatants removed from cells containing this gene activated the ISRE assay. Thus, it is likely that this gene activates leukemia cells through the Jak-STAT signal transduction pathway. The interferon-sensitive response element is a promoter element found upstream of many genes which are involved in the Jak-STAT pathway. The Jak-STAT pathway is a large, signal transduction pathway involved in the differentiation and proliferation of cells. Therefore, activation of the Jak-STAT pathway, reflected by the binding of the ISRE element, can be used to indicate proteins involved in the proliferation and differentiation of cells. Furthermore, contact of cells with supernatant expressing the product of this gene increases the permeability of TP-1 monocyte cells to calcium. Thus, it is likely that the product of this gene is involved in a signal transduction pathway that is initiated when the product of this gene binds a receptor on the surface of the monocyte cell. Thus, polynucleotides and polypeptides have uses which include, but are not limited to, activating monocyte cells.

[0781] This gene is expressed primarily in adult human spleen and adult human testis.

[0782] Therefore, polynucleotides and polypeptides of the invention are useful as reagents for differential identification of the tissue(s) or cell type(s) present in a biological sample and for diagnosis of diseases and conditions which include, but are not limited to, immune disorders. Similarly, polypeptides and antibodies directed to these polypeptides are useful in providing Immunological probes for differential identification of the tissue(s) or cell type(s). For a number of disorders of the above tissues or cells, particularly of the immune system, expression of this gene at significantly higher or lower levels is routinely detected in certain tissues or cell types (e.g., spleen, testes, cancerous and wounded tissues) or bodily fluids (e.g., serum, plasma, urine, synovial fluid and spinal fluid) or another tissue or cell sample taken from an individual having such a disorder, relative to the standard gene expression level, i.e., the expression level in healthy tissue or bodily fluid from an individual not having the disorder.

[0783] Preferred polypeptides of the present invention comprise immunogenic epitopes shown in SEQ ID NO: 231 as residues: Pro-5 to Ala-11. Polynucleotides encoding said polypeptides are also provided.

[0784] The tissue distribution in spleen, in addition to the biological activity data, indicates polynucleotides and polypeptides corresponding to this gene are useful for the treatment and diagnosis of immune disorders. Furthermore, this gene may play a role in the survival, proliferation, and/or differentiation of hematopoietic cells in general, and is of use in the augmentation of the numbers of stem cells and committed progenitors. Protein, as well as, antibodies directed against the protein may show utility as a tumor marker and/or immunotherapy targets for the above listed tissues.

[0785] Many polynucleotide sequences, such as EST sequences, are publicly available and accessible through sequence databases. Some of these sequences are related to SEQ ID NO:107 and may have been publicly available prior to conception of the present invention. Preferably, such related polynucleotides are specifically excluded from the scope of the present invention. To list every related sequence is cumbersome. Accordingly, preferably excluded from the present invention are one or more polynucleotides comprising a nucleotide sequence described by the general formula of a−b, where a is any integer between 1 to 819 of SEQ ID NO:107, b is an integer of 15 to 833, where both a and b correspond to the positions of nucleotide residues shown in SEQ ID NO:107, and where b is greater than or equal to a+14.

[0786] Features of Protein Encoded by Gene No: 98

[0787] Preferred polypeptides of the invention comprise the following amino acid sequence: NSAEQSMLILVT (SEQ ID NO:648), RXDRXPVPELPGYEPTRTDISSFKNIYRYAFDFARDKDQRSLDIDTAKSMLALLLGRTWPLFSVFYQYL EQSKYRVMNKDQWYNVLEFSRTVHADLSYDEDGAWPVLLDEFVEWQKVRQTS (SEQ ID NO:649), PTRTDISSFKNIYRYAFDFARDKDQRSL (SEQ ID NO:650), SMLALLLGRTWPLFSVFYQYLE QSKYRVM (SEQ ID NO:651), FSRTVHADLSNYDEDGAWPVLLDEFVE (SEQ ID NO:652), IYRYAFDFAR (SEQ ID NO:653), KDQRSLDI (SEQ ID NO:654), NVLEFSRT (SEQ ID NO:655), and/or DLSNYDEDGAWPVLLDEFVEW (SEQ ID NO:656). Polynucleotides encoding these polypeptides are also provided.

[0788] In another embodiment, polypeptides of the invention comprise the following amino acid sequence: ERTAVSTGEEPALSRSEKDDEDTWERAAAGLGRAGAGWRLCSSACCCLWELGASAEGLPADRDPLPRLP CPPCRGGRKMPVKKKRKSPGVAAAVAEDGGLKKCKISSYCRSQPPARLISGEEHFSSKKCLAWFYEYAG PDEVVGPEGMEKFCEDIGVEPENIIMLVLAWKLEAEXMGFFTKEEWLKGMTSLQCDCTEXLQNKFDFLR SQLNDISSFKNIYRYAFDFARDKDQRSLDIDTAKSMLALLLGRTWPLFSVFYQYLEQSKYRVMNKDQWY NVLEFSRTVHADLSNYDEDGAWPVLLDEFVEWQKVRQTS (SEQ ID NO:657). Polynucleotides encoding these polypeptides are also provided.

[0789] The gene encoding the disclosed cDNA is believed to reside on chromosome 11. Accordingly, polynucleotides related to this invention are useful as a marker in linkage analysis for chromosome 11.

[0790] This gene is expressed primarily in aortic endothelium, and to a lesser extent, in cancers.

[0791] Therefore, polynucleotides and polypeptides of the invention are useful as reagents for differential identification of the tissue(s) or cell type(s) present in a biological sample and for diagnosis of diseases and conditions which include, but are not limited to, endothelial disorders, particularly abnormalities of the vascular system and cancers. Similarly, polypeptides and antibodies directed to these polypeptides are useful in providing immunological probes for differential identification of the tissue(s) or cell type(s). For a number of disorders of the above tissues or cells, particularly of the vascular system, expression of this gene at significantly higher or lower levels is routinely detected in certain tissues or cell types (e.g., endothelial, vascular, and cancerous and wounded tissues) or bodily. fluids (e.g., lymph, serum, plasma, urine, synovial fluid and spinal fluid) or another tissue or cell sample taken from an individual having such a disorder, relative to the standard gene expression level. i.e., the expression level in healthy tissue or bodily fluid from an individual not having the disorder.

[0792] Preferred polypeptides of the present invention comprise immunogenic epitopes shown in SEQ ID NO: 232 as residues: Arg-28 to Lys-37. Polynucleotides encoding said polypeptides are also provided.

[0793] The tissue distribution in aortic endothelium indicates polynucleotides and polypeptides corresponding to this gene are useful for the treatment, detection, and/or prevention of abnormalities of the vascular system (i.e. embolism, atherosclerosis, aneurysm, stroke, microvascular disease, etc.) and cancers. Furthermore, the protein may also be used to determine biological activity, to raise antibodies, as tissue markers, to isolate cognate ligands or receptors, to identify agents that modulate their interactions, in addition to its use as a nutritional supplement. Protein, as well as, antibodies directed against the protein may show utility as a tumor marker and/or immunotherapy targets for the above listed tissues.

[0794] Many polynucleotide sequences, such as EST sequences, are publicly available and accessible through sequence databases. Some of these sequences are related to SEQ ID NO:108 and may have been publicly available prior to conception of the present invention. Preferably, such related polynucleotides are specifically excluded from the scope of the present invention. To list every related sequence is cumbersome. Accordingly, preferably excluded from the present invention are one or more polynucleotides comprising a nucleotide sequence described by the general formula of a−b, where a is any integer between 1 to 1627 of SEQ ID NO:108, b is an integer of 15 to 1641, where both a and b correspond to the positions of nucleotide residues shown in SEQ ID NO:108, and where b is greater than or equal to a+4.

[0795] Features of Protein Encoded by Gene No: 99

[0796] Preferred polypeptides of the invention comprise the following amino acid sequence: [sequence omitted] (SEQ ID NO:658), GSCLSLLALCSPQARPGPRT (SEQ ID NO:659), HFSPCARFSPVGPSAVPFAATPL (SEQ ID NO:660), AIEERNKSRLTQQASEPTGSPRYLHEQHPGSRSQMDCGSLTMXCPPPRVRDDRTSARGVPRQAAPDIVG GRPSSRACVSXPACAPSAAVFPY (SEQ ID NO:661), LTQQASEPTGSPRYLHEQHPGSRS (SEQ ID NO:662), and/or SARGVPRQAAPDIVGGRPSSRACVS (SEQ ID NO:663). Polynucleotides encoding these polypeptides are also provided.

[0797] This gene is expressed primarily in ovarian tumor, epididiymus, and healing wound groin.

[0798] Therefore, polynucleotides and polypeptides of the invention are useful as reagents for differential identification of the tissue(s) or cell type(s) present in a biological sample and for diagnosis of diseases and conditions which include, but are not limited to, reproductive or endocrine disorders, particularly ovarian and testicular tumors. Similarly, polypeptides and antibodies directed to these polypeptides are useful in providing immunological probes for differential identification of the tissue(s) or cell type(s). For a number of disorders of the above tissues or cells, particularly of the female reproductive system, expression of this gene at significantly higher or lower levels is routinely detected in certain tissues or cell types (e.g., reproductive, endocrine cancerous, ovarian, epididymus, cancerous and wounded tissues) or bodily fluids (e.g., lymph, serum, plasma, urine, seminal fluid, synovial fluid and spinal fluid) or another tissue or cell sample taken from an individual having such a disorder, relative to the standard gene expression level, i.e., the expression level in healthy tissue or bodily fluid from an individual not having the disorder.

[0799] Preferred polypeptides of the present invention comprise immunogenic epitopes shown in SEQ ID NO: 233 as residues: Met-1 to Gly-6, Trp-23 to Arg-29, Ala-38 to Ser-45. Polynucleotides encoding said polypeptides are also provided.

[0800] The tissue distribution in ovarian tumor tissue indicates polynucleotides and polypeptides corresponding to this gene are useful for the diagnosis, treatment, and/or prevention of reproductive disorders, particularly ovarian conditions, such as tumors. Moreover, the tissue distribution in epididymus and healing groin wound tissue indicates that polynucleotides and polypeptides corresponding to this gene are useful for the treatment and diagnosis of conditions concerning proper testicular function (e.g. endocrine function, sperm maturation), as well as cancer. Therefore, this gene product is useful in the treatment of male infertility and/or impotence. This gene product is also useful in assays designed to identify binding agents, as such agents (antagonists) are useful as male contraceptive agents. Similarly, the protein is believed to be useful in the treatment and/or diagnosis of testicular cancer.

[0801] The testes are also a site of active gene expression of transcripts that is expressed, particularly at low levels, in other tissues of the body. Therefore, this gene product is expressed in other specific tissues or organs where it may play related functional roles in other processes, such as hematopoiesis, inflammation, bone formation, and kidney function, to name a few possible target indications. Furthermore, the protein may also be used to determine biological activity, to raise antibodies, as tissue markers, to isolate cognate ligands or receptors, to identify agents that modulate their interactions, in addition to its use as a nutritional supplement. Protein, as well as, antibodies directed against the protein may show utility as a tumor marker and/or immunotherapy targets for the above listed tissues.

[0802] Many polynucleotide sequences, such as EST sequences, are publicly available and accessible through sequence databases. Some of these sequences are related to SEQ ID NO:109 and may have been publicly available prior to conception of the present invention. Preferably, such related polynucleotides are specifically excluded from the scope of the present invention. To list every related sequence is cumbersome. Accordingly, preferably excluded from the present invention are one or more polynucleotides comprising a nucleotide sequence described by the general formula of a−b, where a is any integer between 1 to 557 of SEQ ID NO:109, b is an integer of 15 to 571, where both a and b correspond to the positions of nucleotide residues shown in SEQ ID NO:109, and where b is greater than or equal to a+14.

[0803] Features of Protein Encoded by Gene No: 100

[0804] This gene is expressed primarily in human tonsils.

[0805] Therefore, polynucleotides and polypeptides of the invention are useful as reagents for differential identification of the tissue(s) or cell type(s) present in a biological sample and for diagnosis of diseases and conditions which include, but are not limited to, relating to inflammatory diseases such as tonsilitis, and immune system disorders. Similarly, polypeptides and antibodies directed to these polypeptides are useful in providing immunological probes for differential identification of the tissue(s) or cell type(s). For a number of disorders of the above tissues or cells, particularly of the immune system, expression of this gene at significantly higher or lower levels is routinely detected in certain tissues or cell types (e.g., immune, cancerous and wounded tissues) or bodily fluids (e.g., serum, plasma, urine, synovial fluid and spinal fluid) or another tissue or cell sample taken from an individual having such a disorder, relative to the standard gene expression level, i.e., the expression level in healthy tissue or bodily fluid from an individual not having the disorder.

[0806] The tissue distribution in tonsils indicates polynucleotides and polypeptides corresponding to this gene are useful for the diagnosis, treatment, and/or prevention of lymphoid tissue disorders such as tonsilitis. Furthermore, the tissue distribution indicates polynucleotides and polypeptides corresponding to this gene are useful for the diagnosis and treatment of a variety of immune system disorders. Expression of this gene product in tonsils indicates a role in the regulation of the proliferation; survival; differentiation; and/or activation of potentially all hematopoietic cell lineages, including blood stem cells. This gene product is involved in the regulation of cytokine production, antigen presentation, or other processes that may also suggest a usefulness in the treatment of cancer (e.g. by boosting immune responses).

[0807] Since the gene is expressed in cells of lymphoid origin, the gene or protein, as well as, antibodies directed against the protein may show utility as a tumor marker and/or immunotherapy targets for the above listed tissues. Therefore it is also used as an agent for immunological disorders including arthritis, asthma, immune deficiency diseases such as AIDS, leukemia, rheumatoid arthritis, inflammatory bowel disease, sepsis, acne, and psoriasis. In addition, this gene product may have commercial utility in the expansion of stem cells and committed progenitors of various blood lineages, and in the differentiation and/or proliferation of various cell types. Protein, as well as, antibodies directed against the protein may show utility as a tumor marker and/or immunotherapy targets for the above listed tissues.

[0808] Many polynucleotide sequences, such as EST sequences, are publicly available and accessible through sequence databases. Some of these sequences are related to SEQ ID NO:110 and may have been publicly available prior to conception of the present invention Preferably, such related polynucleotides are specifically excluded from the scope of the present invention. To list every related sequence is cumbersome. Accordingly, preferably excluded from the present invention are one or more polynucleotides comprising a nucleotide sequence described by the general formula of a-b, where a is any integer between 1 to 1623 of SEQ ID NO:110, b is an integer of 15 to 1637, where both a and b correspond to the positions of nucleotide residues shown in SEQ ID NO:110, and where b is greater than or equal to a+14.

[0809] Features of Protein Encoded by Gene No: 101

[0810] This gene is expressed primarily in activated T-cells and prostate tissue.

[0811] Therefore, polynucleotides and polypeptides of the invention are useful as reagents for differential identification of the tissue(s) or cell type(s) present in a biological sample and for diagnosis of diseases and conditions which include, but are not limited to, T lymphocytes related diseases and inflammation of the prostate. Similarly, polypeptides and antibodies directed to these polypeptides are useful in providing immunological probes for differential identification of the tissue(s) or cell type(s). For a number of disorders of the above tissues or cells, particularly of the immune and reproductive systems, expression of this gene at significantly higher or lower levels is routinely detected in certain tissues or cell types (e.g., immune, reproductive, cancerous and wounded tissues) or bodily fluids (e.g., serum, plasma, urine, synovial fluid and spinal fluid) or another tissue or cell sample taken from an individual having such a disorder, relative to the standard gene expression level, i.e., the expression level in healthy tissue or bodily fluid from an individual not having the disorder.

[0812] Preferred polypeptides of the present invention comprise immunogenic epitopes shown in SEQ ID NO: 235 as residues: Arg-24 to Trp-36. Polynucleotides encoding said polypeptides are also provided.

[0813] The tissue distribution in immune system tissues and prostate tissue indicates polynucleotides and polypeptides corresponding to this gene are useful for the diagnosis and treatment of immune and reproductive disorders. This gene product is involved in the regulation of cytokine production, antigen presentation, or other processes that may also suggest a usefulness in the treatment of cancer (e.g. by boosting immune responses).

[0814] Since the gene is expressed in cells of lymphoid origin, the gene or protein, as well as, antibodies directed against the protein may show utility as a tumor marker and/or immunotherapy targets for the above listed tissues. Therefore it is also used as an agent for immunological disorders including arthritis, asthma, immune deficiency diseases such as AIDS, leukemia, rheumatoid arthritis, inflammatory bowel disease, sepsis, acne, and psoriasis. In addition, this gene product may have commercial utility in the expansion of stem cells and committed progenitors of various blood lineages, and in the differentiation and/or proliferation of various cell types. Expression of this gene product in T cells also strongly indicates a role for this protein in immune function and immune surveillance. Protein, as well as, antibodies directed against the protein may show utility as a tumor marker and/or immunotherapy targets for the above listed tissues.

[0815] Many polynucleotide sequences, such as EST sequences, are publicly available and accessible through sequence databases. Some of these sequences are related to SEQ ID NO:111 and may have been publicly available prior to conception of the present invention. Preferably, such related polynucleotides are specifically excluded from the scope of the present invention. To list every related sequence is cumbersome. Accordingly, preferably excluded from the present invention are one or more polynucleotides comprising a nucleotide sequence described by the general formula of a-b, where a is any integer between 1 to 1574 of SEQ ID NO:111, b is an integer of 15 to 1588, where both a and b correspond to the positions of nucleotide residues shown in SEQ ID NO:111, and where b is greater than or equal to a+14.

[0816] Features of Protein Encoded by Gene No: 102

[0817] This gene is expressed primarily in human adult pulmonary tissue and infant brain.

[0818] Therefore, polynucleotides and polypeptides of the invention are useful as reagents for differential identification of the tissue(s) or cell type(s) present in a biological sample and for diagnosis of diseases and conditions which include. but are not limited to, relating to the lung, neurological and immunological disorders. Similarly, polypeptides and antibodies directed to these polypeptides are useful in providing immunological probes for differential identification of the tissue(s) or cell type(s). For a number of disorders of the above tissues or cells, particularly of the respiratory, nervous, and immune systems expression of this gene at significantly higher or lower levels is routinely detected in certain tissues or cell types (e.g., pulmonary, immune, nervous, cancerous and wounded tissues) or bodily fluids (e.g., serum, plasma, urine, synovial fluid and spinal fluid) or another tissue or cell sample taken from an individual having such a disorder, relative to the standard gene expression level, i.e., the expression level in healthy tissue or bodily fluid from an individual not having the disorder.

[0819] The tissue distribution in pulmonary tissue and infant brain tissue indicates polynucleotides and polypeptides corresponding to this gene are useful for the diagnosis and treatment for disorders relating to the pulmonary system, the central nervous system, and the immune system. Furthermore, the tissue distribution in pulmonary tissue and fetal tissue indicates polynucleotides and polypeptides corresponding to this gene are useful for the detection and treatment of disorders associated with developing lungs, particularly in premature infants where the lungs are the last tissues to develop. The tissue distribution indicates polynucleotides and polypeptides corresponding to this gene are useful for the diagnosis and intervention of lung tumors, since the gene is involved in the regulation of cell division.

[0820] Additionally, the tissue distribution indicates polynucleotides and polypeptides corresponding to this gene are useful for the detection/treatment of neurodegenerative disease states and behavioural disorders such as Alzheimer's Disease, Parkinson's Disease, Huntington's Disease, Tourette Syndrome, schizophrenia, mania, dementia, paranoia, obsessive compulsive disorder, panic disorder, learning disabilities, ALS, psychoses, autism, and altered behaviors, including disorders in feeding, sleep patterns, balance, and perception. In addition, the gene or gene product may also play a role in the treatment and/or detection of developmental disorders associated with the developing embryo, or sexually-linked disorders. Also, this gene product is involved in the regulation of cytokine production. antigen presentation, or other processes that may also suggest a usefulness in the treatment of cancer (e.g. by boosting immune responses).

[0821] Since the gene is expressed in cells of lymphoid origin, the gene or protein, as well as, antibodies directed against the protein may show utility as a tumor marker and/or immunotherapy targets for the above listed tissues. Therefore it is also used as an agent for immunological disorders including arthritis, asthma, immune deficiency diseases such as AIDS, leukemia, rheumatoid arthritis, inflammatory bowel disease, sepsis, acne, and psoriasis. In addition, this gene product may have commercial utility in the expansion of stem cells and committed progenitors of various blood lineages, and in the differentiation and/or proliferation of various cell types. Protein, as well as, antibodies directed against the protein may show utility as a tumor marker and/or immunotherapy targets for the above listed tissues.

[0822] Many polynucleotide sequences, such as EST sequences, are publicly available and accessible through sequence databases. Some of these sequences are related to SEQ ID NO:112 and may have been publicly available prior to conception of the present invention. Preferably, such related polynucleotides are specifically excluded from the scope of the present invention. To list every related sequence is cumbersome. Accordingly, preferably excluded from the present invention are one or more polynucleotides comprising a nucleotide sequence described by the general formula of a-b, where a is any integer between 1 to 1912 of SEQ ID NO:112, b is an integer of 15 to 1926, where both a and b correspond to the positions of nucleotide residues shown in SEQ ID NO:112, and where b is greater than or equal to a+14.

[0823] Features of Protein Encoded by Gene No: 103

[0824] The translation product of this gene shares sequence homology with the KIAA0132 gene product, and also shares homology to Drosophila melanogaster ring canel protein.

[0825] The gene encoding the disclosed cDNA is thought to reside on chromosome 1. Accordingly, polynucleotides related to this invention are useful as a marker in linkage analysis for chromosome 1. A preferred embodiment of the invention is a polypeptide comprising the following amino acid sequence: MSTRRLGVAVAVLGGFLYAVGGSDGTSPLNTVERYNPQENRWHTIAPMGTRRKHLGCAVYQDMIYAVGG RDDTTELSSAERYNPRTNQWSPVVAMTSRRSGVGLAVVNGQLMAVGGFDGTTYLKTIEVFDPDANTWRL YGGMNYRRLGGGVGVIKMTHCESHIW (SEQ ID NO: 256) or SDGTSPLNTVERYNPQENRWHTIAPMGTRRKHLGCAVYQDMIYAVGGRDDTTELSSAERYNPRTNQWSP VVAMTSRRSGVGLAVVNGQLMAVGGFDGTTYLKTIEVFDPDANTWRLYGGMNYRRLGGGVGVIKMTHCE SHIW (SEQ ID NO: 665) or a subfragment thereof as described elsewhere herein. Polynucleotides encoding such polypeptides are also provided.

[0826] This gene is expressed primarily in infant brain and B-cell lymphoma.

[0827] Therefore, polynucleotides and polypeptides of the invention are useful as reagents for differential identification of the tissue(s) or cell type(s) present in a biological sample and for diagnosis of diseases and conditions which include, but are not limited to, relating to the central nervous system and B cell disorders. Similarly, polypeptides and antibodies directed to these polypeptides are useful in providing immunological probes for differential identification of the tissue(s) or cell type(s). For a number of disorders of the above tissues or cells, particularly of the central nervous and immune systems, expression of this gene at significantly higher or lower levels is routinely detected in certain tissues or cell types (e.g., central nervous system, immune, cancerous and wounded tissues) or bodily fluids (e.g., serum, plasma, urine, synovial fluid and spinal fluid) or another tissue or cell sample taken from an individual having such a disorder, relative to the standard gene expression level, i.e., the expression level in healthy tissue or bodily fluid from an individual not having the disorder.

[0828] Preferred polypeptides of the present invention comprise immunogenic epitopes shown in SEQ ID NO: 237 as residues: Met-1 to Gly-15, Thr-26 to Pro-34, Tyr-45 to Thr-54, Ala-102 to Thr-107, Val-225 to Gln-230, Ile-243 to Leu-250, Gln-298 to Met-303, Gly-305 to Ile-314, Glu-336 to Glu-344, His-373 to Tyr-378, Ser-381 to Ser-394, Arg-432 to Thr-441, Thr-476 to Trp-487, Gly-494 to His-499, Gly-513 to Glu-520, Ser-522 to Trp-534, Met-587 to Gly-593. Polynucleotides encoding said polypeptides are also provided.

[0829] The tissue distribution in infant brain and B-cell lymphomas indicates polynucleotides and polypeptides corresponding to this gene are useful for the diagnosis, treatment, and/or prevention for central nervous system and immune disorders. Furthermore, the tissue distribution indicates polynucleotides and polypeptides corresponding to this gene are useful for the detection/treatment of neurodegenerative disease states and behavioural disorders such as Alzheimer's Disease, Parkinson's Disease, Huntington's Disease, Tourette Syndrome, schizophrenia, mania, dementia, paranoia, obsessive compulsive disorder, panic disorder, learning disabilities, ALS, psychoses, autism, and altered behaviors, including disorders in feeding, sleep patterns, balance, and perception. In addition, the gene or gene product may also play a role in the treatment and/or detection of developmental disorders associated with the developing embryo, or sexually-linked disorders. Additionally, this gene product is involved in the regulation of cytokine production, antigen presentation, or other processes that may also suggest a usefulness in the treatment of cancer (e.g. by boosting immune responses).

[0830] Since the gene is expressed in cells of lymphoid origin, the gene or protein, as well as, antibodies directed against the protein may show utility as a tumor marker and/or immunotherapy targets for the above listed tissues. Therefore it is also used as an agent for immunological disorders including arthritis, asthma, immune deficiency diseases such as AIDS, leukemia, rheumatoid arthritis, inflammatory bowel disease, sepsis, acne, and psoriasis. In addition, this gene product may have commercial utility in the expansion of stem cells and committed progenitors of various blood lineages, and in the differentiation and/or proliferation of various cell types. Protein, as well as, antibodies directed against the protein may show utility as a tumor marker and/or immunotherapy targets for the above listed tissues.

[0831] Many polynucleotide sequences, such as EST sequences, are publicly available and accessible through sequence databases. Some of these sequences are related to SEQ ID NO:113 and may have been publicly available prior to conception of the present invention. Preferably, such related polynucleotides are specifically excluded from the scope of the present invention. To list every related sequence is cumbersome. Accordingly, preferably excluded from the present invention are one or more polynucleotides comprising a nucleotide sequence described by the general formula of a-b, where a is any integer between 1 to 2260 of SEQ ID NO:113, b is an integer of 15 to 2274, where both a and b correspond to the positions of nucleotide residues shown in SEQ ID NO:113, and where b is greater than or equal to a+14.

[0832] Features of Protein Encoded by Gene No: 104

[0833] When tested against sensory neuron cell lines, supernatants removed from cells containing this gene activated the EGR1 assay. Thus, it is likely that this gene activates neuronal cells through a signal transduction pathway. Early growth response 1 (EGR1) is a promoter associated with certain genes that induces various tissues and cell types upon activation, leading the cells to undergo differentiation and proliferation.

[0834] The gene encoding the disclosed cDNA is thought to reside on chromosome 1. Accordingly, polynucleotides related to this invention are useful as a marker in linkage analysis for chromosome 1.

[0835] This gene is expressed primarily in human gall bladder.

[0836] Therefore, polynucleotides and polypeptides of the invention are useful as reagents for differential identification of the tissue(s) or cell type(s) present in a biological sample and for diagnosis of diseases and conditions which include, but are not limited to, relating to gastrointestinal disorders. Similarly, polypeptides and antibodies directed to these polypeptides are useful in providing immunological probes for differential identification of the tissue(s) or cell type(s). For a number of disorders of the above tissues or cells, particularly of the gastrointestinal system, expression of this gene at significantly higher or lower levels is routinely detected in certain tissues or cell types (e.g., gall bladder, cancerous and wounded tissues) or bodily fluids (e.g., serum, plasma, urine, synovial fluid and spinal fluid) or another tissue or cell sample taken from an individual having such a disorder, relative to the standard gene expression level, i.e., the expression level in healthy tissue or bodily fluid from an individual not having the disorder.

[0837] Preferred polypeptides of the present invention comprise immunogenic epitopes shown in SEQ ID NO: 238 as residues: Pro-45 to Pro-51. Polynucleotides encoding said polypeptides are also provided.

[0838] The tissue distribution in gall bladder indicates polynucleotides and polypeptides corresponding to this gene are useful for the diagnosis and treatment of gastrointestinal disorders. Protein, as well as, antibodies directed against the protein may show utility as a tissue-specific marker and/or immunotherapy target for the above listed tissues.

[0839] Many polynucleotide sequences, such as EST sequences, are publicly available and accessible through sequence databases. Some of these sequences are related to SEQ ID NO:114 and may have been publicly available prior to conception of the present invention. Preferably, such related polynucleotides are specifically excluded from the scope of the present invention. To list every related sequence is cumbersome. Accordingly, preferably excluded from the present invention are one or more polynucleotides comprising a nucleotide sequence described by the general formula of a-b, where a is any integer between 1 to 1601 of SEQ ID NO:114, b is an integer of 15 to 1615, where both a and b correspond to the positions of nucleotide residues shown in SEQ ID NO:114, and where b is greater than or equal to a+14.

[0840] Features of Protein Encoded by Gene No: 105

[0841] This gene is expressed primarily in human whole brain.

[0842] Therefore, polynucleotides and polypeptides of the invention are useful as reagents for differential identification of the tissue(s) or cell type(s) present in a biological sample and for diagnosis of diseases and conditions which include, but are not limited to, neurodegenerative diseases. Similarly, polypeptides and antibodies directed to these polypeptides are useful in providing immunological probes for differential identification of the tissue(s) or cell type(s). For a number of disorders of the above tissues or cells, particularly of the central nervous and endocrine systems, expression of this gene at significantly higher or lower levels is routinely detected in certain tissues or cell types (e.g., brain, cancerous and wounded tissues) or bodily fluids (e.g., serum, plasma, urine, synovial fluid and spinal fluid) or another tissue or cell sample taken from an individual having such a disorder, relative to the standard gene expression level, i.e., the expression level in healthy tissue or bodily fluid from an individual not having the disorder.

[0843] Preferred polypeptides of the present invention comprise immunogenic epitopes shown in SEQ ID NO: 239 as residues: Gln-58 to Asp-64, His-69 to Pro-76, Leu-101 to Glu-108. Polynucleotides encoding said polypeptides are also provided.

[0844] The tissue distribution in brain tissue indicates polynucleotides and polypeptides corresponding to this gene are useful for the diagnosis and treatment of the central nervous system and endocrine system disorders. Furthermore, the tissue distribution indicates polynucleotides and polypeptides corresponding to this gene are useful for the detection/treatment of neurodegenerative disease states and behavioural disorders such as Alzheimer's Disease, Parkinson's Disease, Huntington's Disease, Tourette Syndrome, schizophrenia, mania, dementia, paranoia, obsessive compulsive disorder, panic disorder, learning disabilities, ALS, psychoses, autism, and altered behaviors, including disorders in feeding, sleep patterns, balance, and perception. In addition, the gene or gene product may also play a role in the treatment and/or detection of developmental disorders associated with the developing embryo, or sexually-linked disorders. Protein, as well as, antibodies directed against the protein may show utility as a tumor marker and/or immunotherapy targets for the above listed tissues.

[0845] Many polynucleotide sequences, such as EST sequences, are publicly available and accessible through sequence databases. Some of these sequences are related to SEQ ID NO:115 and may have been publicly available prior to conception of the present invention. Preferably, such related polynucleotides are specifically excluded from the scope of the present invention. To list every related sequence is cumbersome. Accordingly, preferably excluded from the present invention are one or more polynucleotides comprising a nucleotide sequence described by the general formula of a-b, where a is any integer between 1 to 1207 of SEQ ID NO:115, b is an integer of 15 to 1221, where both a and b correspond to the positions of nucleotide residues shown in SEQ ID NO:115, and where b is greater than or equal to a+14.

[0846] Features of Protein Encoded by Gene No: 106

[0847] The translation product of this gene shares sequence homology with human translation initiation factor eIF3 p40 subunit.

[0848] This gene is expressed primarily in human adipose, human fetal spleen, and dentritic cells.

[0849] Therefore, polynucleotides and polypeptides of the invention are useful as reagents for differential identification of the tissue(s) or cell type(s) present in a biological sample and for diagnosis of diseases and conditions which include, but are not limited to, adipose, immune and nerve cell disorders. Similarly, polypeptides and antibodies directed to these polypeptides are useful in providing immunological probes for differential identification of the tissue(s) or cell type(s). For a number of disorders of the above tissues or cells, particularly of the immune and nervous systems, expression of this gene at significantly higher or lower levels is routinely detected in certain tissues or cell types (e.g., adipose, immune, nervous, cancerous and wounded tissues) or bodily fluids (e.g., serum, plasma, urine, synovial fluid and spinal fluid) or another tissue or cell sample taken from an individual having such a disorder, relative to the standard gene expression level, i.e., the expression level in healthy tissue or bodily fluid from an individual not having the disorder.

[0850] Preferred polypeptides of the present invention comprise immunogenic epitopes shown in SEQ ID NO: 240 as residues: Asn-27 to Ser-33, Gln-44 to Lys-50. Polynucleotides encoding said polypeptides are also provided.

[0851] The tissue distribution fetal liver/spleen and dendritic cells indicates polynucleotides and polypeptides corresponding to this gene are useful for the diagnosis and treatment of immune and nerve cell disorders. Furthermore, the tissue distribution in adipose tissue indicates polynucleotides and polypeptides corresponding to this gene are useful for the treatment of obesity and other metabolic and endocrine conditions or disorders. Additionally, the protein product of this gene may show utility in ameliorating conditions which occur secondary to aberrant fatty-acid metabolism (e.g. aberrant myelin sheath development), either directly or indirectly. Also, the tissue distribution indicates polynucleotides and polypeptides corresponding to this gene are useful for the diagnosis and/or treatment of hematopoietic disorders. This gene product is primarily expressed in hematopoietic cells and tissues suggesting that it plays a role in the survival, proliferation, and/or differentiation of hematopoieitic lineages. This is particularly supported by the expression of this gene product in fetal liver, which is a primary site of definitive hematopoiesis. Expression of this gene product in primary dendritic cells also strongly indicates a role for this protein in immune function and immune surveillance. Protein, as well as, antibodies directed against the protein may show utility as a tumor marker and/or immunotherapy targets for the above listed tissues.

[0852] Many polynucleotide sequences, such as EST sequences, are publicly available and accessible through sequence databases. Some of these sequences are related to SEQ ID NO:116 and may have been publicly available prior to conception of the present invention. Preferably, such related polynucleotides are specifically excluded from the scope of the present invention. To list every related sequence is cumbersome. Accordingly, preferably excluded from the present invention are one or more polynucleotides comprising a nucleotide sequence described by the general formula of a-b, where a is any integer between 1 to 1135 of SEQ ID NO:116, b is an integer of 15 to 1149, where both a and b correspond to the positions of nucleotide residues shown in SEQ ID NO:116, and where b is greater than or equal to a+14.

[0853] Features of Protein Encoded by Gene No: 107

[0854] Preferred polypeptides of the invention comprise the following amino acid sequence: ELSGLVIITAWIILCHSSSKNPVGGRIQLAIAIVITLFPFISWVYIYINKEMRSSWPTHCKTVI (SEQ ID NO:666), QCPQGTETEAGVSVPPRKEGGGPYVAGLTAPHVAGLTAPRRVLRAMAPALWRACNGL (SEQ ID NO:667), HSSSKNPVGGRIQLAIAIVITLFPFISWVYIY (SEQ ID NO:668), and/or RKEGGGPYVAGLTAPHVAGLTAPRRVLRAMAP (SEQ ID NO:669). Polynucleotides encoding these polypeptides are also provided.

[0855] This gene is expressed primarily in liver tissues, and to a lesser extent in t-cell lymphoma.

[0856] Therefore, polynucleotides and polypeptides of the invention are useful as reagents for differential identification of the tissue(s) or cell type(s) present in a biological sample and for diagnosis of diseases and conditions which include, but are not limited to, hepatitis, sclerosis of the liver and cancer of the liver. Similarly, polypeptides and antibodies directed to these polypeptides are useful in providing immunological probes for differential identification of the tissue(s) or cell type(s). For a number of disorders of the above tissues or cells, particularly of the immune system, expression of this gene at significantly higher or lower levels is routinely detected in certain tissues or cell types (e.g., immune, cancerous and wounded tissues) or bodily fluids (e.g., serum, plasma, urine, synovial fluid and spinal fluid) or another tissue or cell sample taken from an individual having such a disorder, relative to the standard gene expression level, i.e., the expression level in healthy tissue or bodily fluid from an individual not having the disorder.

[0857] The tissue distribution in liver indicates polynucleotides and polypeptides corresponding to this gene are useful for the diagnosis and possible treatment of diseases of the liver. Since it is primarily found in the liver, and with the additional expression seen in T-cells, it most likely deals with the immune response in the liver, for example to diseases like hepatitis, sclerosis and hepatocellular carcinoma. More generally, the tissue distribution in liver indicates polynucleotides and polypeptides corresponding to this gene are useful for the detection and treatment of liver disorders and cancers (e.g. hepatoblastoma, jaundice, hepatitis, liver metabolic diseases and conditions that are attributable to the differentiation of hepatocyte progenitor cells). Protein, as well as, antibodies directed against the protein may show utility as a tumor marker and/or immunotherapy targets for the above listed tissues.

[0858] Many polynucleotide sequences, such as EST sequences, are publicly available and accessible through sequence databases. Some of these sequences are related to SEQ ID NO:117 and may have been publicly available prior to conception of the present invention. Preferably, such related polynucleotides are specifically excluded from the scope of the present invention. To list every related sequence is cumbersome. Accordingly, preferably excluded from the present invention are one or more polynucleotides comprising a nucleotide sequence described by the general formula of a-b, where a is any integer between 1 to 1941 of SEQ ID NO:117, b is an integer of 15 to 1955, where both a and b correspond to the positions of nucleotide residues shown in SEQ ID NO:117, and where b is greater than or equal to a+14.

[0859] Features of Protein Encoded by Gene No: 108

[0860] The gene encoding the disclosed cDNA is thought to reside on chromosome 10. Accordingly, polynucleotides related to this invention are useful as a marker in linkage analysis for chromosome 10.

[0861] This gene is expressed primarily in myeloid progenitor cells, and to a lesser extent in leukemic cells and eosinophils.

[0862] Therefore, polynucleotides and polypeptides of the invention are useful as reagents for differential identification of the tissue(s) or cell type(s) present in a biological sample and for diagnosis of diseases and conditions which include, but are not limited to, leukimia and other blood diseases. Similarly, polypeptides and antibodies directed to these polypeptides are useful in providing immunological probes for differential identification of the tissue(s) or cell type(s). For a number of disorders of the above tissues or cells, particularly of the hematopoesis and immune systems, expression of this gene at significantly higher or lower levels is routinely detected in certain tissues or cell types (e.g., immune, cancerous and wounded tissues) or bodily fluids (e.g., serum, plasma, urine, synovial fluid and spinal fluid) or another tissue or cell sample taken from an individual having such a disorder, relative to the standard gene expression level, i.e., the expression level in healthy tissue or bodily fluid from an individual not having the disorder.

[0863] Preferred polypeptides of the present invention comprise immunogenic epitopes shown in SEQ ID NO: 242 as residues: Val-51 to Tyr-58. Polynucleotides encoding said polypeptides are also provided.

[0864] The tissue distribution in immune tissues indicates polynucleotides and polypeptides corresponding to this gene are useful for the treatment and diagnosis of leukemia. Furthermore, the polypeptides or polynucleotides are also useful to enhance or protect proliferation, differentiation, and functional activation of hematopoietic progenitor cells (e.g., bone marrow cells), useful in treating cancer patients undergoing chemotherapy or patients undergoing bone marrow transplantation. Protein, as well as, antibodies directed against the protein may show utility as a tumor marker and/or immunotherapy targets for the above listed tissues.

[0865] Many polynucleotide sequences, such as EST sequences, are publicly available and accessible through sequence databases. Some of these sequences are related to SEQ ID NO:118 and may have been publicly available prior to conception of the present invention. Preferably, such related polynucleotides are specifically excluded from the scope of the present invention. To list every related sequence is cumbersome. Accordingly, preferably excluded from the present invention are one or more polynucleotides comprising a nucleotide sequence described by the general formula of a-b, where a is any integer between 1 to 1121 of SEQ ID NO:118, b is an integer of 15 to 1135, where both a and b correspond to the positions of nucleotide residues shown in SEQ ID NO:118, and where b is greater than or equal to a+14.

[0866] Features of Protein Encoded by Gene No: 109

[0867] Preferred polypeptides of the invention comprise the following amino acid sequence: PRVRKTPHLSASGK (SEQ ID NO:670), YYYSMLKICHITILETLSDRTPRKFAK KCYILYIKLSDSSVEKVAYTLLLLIPAAIEKK (SEQ ID NO:671), and/or TILETLSDRTPRKFAKKCYILYIKLSDSSVEK (SEQ ID NO:672). Polynucleotides encoding these polypeptides are also provided. The polypeptide of this gene has been determined to have two transmembrane domains at about amino acid position 1-18 and 40-69 of the amino acid sequence referenced in Table 1 for this gene. Based upon these characteristics, it is believed that the protein product of this gene shares structural features to type IIIb membrane proteins.

[0868] A preferred polypeptide fragment of the invention comprises the following amino acid sequence: MHGHTSSLPPSLLSSLPSGLLALFVFPFLILLLHAEDLPYYYFGNIE (SEQ ID NO:258) . Polynucleotides encoding these polypeptides are also provided.

[0869] This gene is expressed primarily in endometrial stromal cells treated with estradiol.

[0870] Therefore, polynucleotides and polypeptides of the invention are useful as reagents for differential identification of the tissue(s) or cell type(s) present in a biological sample and for diagnosis of diseases and conditions which include, but are not limited to, reproductive disorders, particularly cancer of the endometrium. Similarly, polypeptides and antibodies directed to these polypeptides are useful in providing immunological probes for differential identification of the tissue(s) or cell type(s). For a number of disorders of the above tissues or cells, particularly of the reproductive system, expression of this gene at significantly higher or lower levels is routinely detected in certain tissues or cell types (e.g., reproductive, endometrial, and cancerous and wounded tissues) or bodily fluids (e.g., lymph, serum, plasma, urine, synovial fluid and spinal fluid) or another tissue or cell sample taken from an individual having such a disorder, relative to the standard gene expression level, i.e., the expression level in healthy tissue or bodily fluid from an individual not having the disorder.

[0871] The tissue distribution in endometrial stromal cells indicates polynucleotides and polypeptides corresponding to this gene are useful for the diagnosis, treatment, and/or prevention of diseases of the endometrium, particularly cancer or diseases caused by hormonal imbalances. The protein can also be used to determine biological activity, to raise antibodies, as tissue markers, to isolate cognate ligands or receptors, to identify agents that modulate their interactions, and as nutritional supplements. It may also have a very wide range of biological activities. Representative uses are described in the “Chemotaxis” and “Binding Activity” sections below, in Examples 11, 12, 13, 14, 15, 16, 18, 19, and 20, and elsewhere herein. Briefly, the protein may possess the following activities: cytokine, cell proliferation/differentiation modulating activity or induction of other cytokines; immunostimulating/immunosuppressant activities (e.g. for treating human immunodeficiency virus infection, cancer, autoimmune diseases and allergy); regulation of hematopoiesis (e.g. for treating anemia or as adjunct to chemotherapy); stimulation or growth of bone, cartilage, tendons, ligaments and/or nerves (e.g. for treating wounds, stimulation of follicle stimulating hormone (for control of fertility); chemotactic and chemokinetic activities (e.g. for treating infections, tumors); hemostatic or thrombolytic activity (e.g. for treating hemophilia, cardiac infarction etc.); anti-inflammatory activity (e.g. for treating septic shock, Crohn's Disease); as antimicrobials; for treating psoriasis or other hyperproliferative diseases; for regulation of metabolism, and behavior. Also contemplated is the use of the corresponding nucleic acid in gene therapy procedures. Protein, as well as, antibodies directed against the protein may show utility as a tumor marker and/or immunotherapy targets for the above listed tissues.

[0872] Many polynucleotide sequences, such as EST sequences, are publicly available and accessible through sequence databases. Some of these sequences are related to SEQ ID NO:119 and may have been publicly available prior to conception of the present invention. Preferably, such related polynucleotides are specifically excluded from the scope of the present invention. To list every related sequence is cumbersome. Accordingly, preferably excluded from the present invention are one or more polynucleotides comprising a nucleotide sequence described by the general formula of a-b, where a is any integer between 1 to 2579 of SEQ ID NO:119, b is an integer of 15 to 2593, where both a and b correspond to the positions of nucleotide residues shown in SEQ ID NO:119, and where b is greater than or equal to a+14.

| | | | | | | | | | 5′ NT | | | | | |
|---|---|---|---|---|---|---|---|---|---|---|---|---|---|---|
| | | | | NT | | | | | of | AA | First | Last | | |
| | | ATCC | | SEQ | | 5′ NT | 3′ NT | 5′ NT | First | SEQ | AA | AA | First | Last |
| | | Deposit | | ID | Total | of | of | of | AA of | ID | of | of | AA of | AA |
| Gene | cDNA | Nr and | | NO: | NT | Clone | Clone | Start | Signal | NO: | Sig | Sig | Secreted | of |
| No. | Clone ID | Date | Vector | X | Seq. | Seq. | Seq. | Codon | Pep | Y | Pep | Pep | Portion | ORF |
| 1 | HKAAK02 | 209551 | pCMVSport | 11 | 859 | 1 | 859 | 97 | 97 | 135 | 1 | 33 | 34 | 196 |
| | | 12/12/97 | 2.0 | | | | | | | | | | | |
| 2 | HEPAA46 | 209551 | Uni-ZAP XR | 12 | 1129 | 1 | 1129 | 18 | 18 | 136 | 1 | 20 | 21 | 123 |
| | | 12/12/97 | | | | | | | | | | | | |
| 3 | HFCCQ50 | 209463 | Uni-ZAP XR | 13 | 1271 | 1 | 1271 | 47 | 47 | 137 | 1 | 20 | 21 | 352 |
| | | 11/14/97 | | | | | | | | | | | | |
| 4 | HGBHR26 | 209511 | Uni-ZAP XR | 14 | 913 | 1 | 913 | 174 | 174 | 138 | 1 | 22 | 23 | 129 |
| | | 12/03/97 | | | | | | | | | | | | |
| 5 | HFPCX09 | 209551 | Uni-ZAP XR | 15 | 2674 | 59 | 2674 | 249 | 249 | 139 | 1 | 26 | 27 | 549 |
| | | 12/12/97 | | | | | | | | | | | | |
| 5 | HFPCX09 | 209551 | Uni-ZAP XR | 120 | 2207 | 1 | 2207 | 185 | 185 | 244 | 1 | 26 | 27 | 66 |
| | | 12/12/97 | | | | | | | | | | | | |
| 6 | HLWAA88 | 209551 | pCMVSport | 16 | 1636 | 1 | 1636 | 51 | 51 | 140 | 1 | 22 | 23 | 488 |
| | | 12/12/97 | 3.0 | | | | | | | | | | | |
| 6 | HLWAA88 | 209551 | pCMVSport | 121 | 1770 | 1 | 1770 | 35 | 35 | 245 | 1 | 22 | 23 | 113 |
| | | 12/12/97 | 3.0 | | | | | | | | | | | |
| 7 | HKDBF34 | 209511 | pCMVSport | 17 | 1432 | 60 | 1418 | 69 | 69 | 141 | 1 | 14 | 15 | 222 |
| | | 12/03/97 | 1 | | | | | | | | | | | |
| 7 | HKDBF34 | 209511 | pCMVSport | 122 | 1356 | 1 | 1356 | 18 | 18 | 246 | 1 | 19 | 20 | 104 |
| | | 12/03/97 | 1 | | | | | | | | | | | |
| 8 | H6EAB28 | 209511 | Uni-ZAP XR | 18 | 1547 | 1 | 1547 | 116 | 116 | 142 | 1 | 21 | 22 | 76 |
| | | 12/03/97 | | | | | | | | | | | | |
| 9 | HILWAO22 | 209511 | pCMVSport | 19 | 1338 | 1 | 1311 | 212 | 212 | 143 | 1 | 21 | 22 | 354 |
| | | 12/03/97 | 3.0 | | | | | | | | | | | |
| 10 | HAGFH53 | 209511 | Uni-ZAP XR | 20 | 2071 | 1 | 2071 | 96 | 96 | 144 | 1 | 36 | 37 | 89 |
| | | 12/03/97 | | | | | | | | | | | | |
| 11 | HOHBV89 | 209551 | pCMVSport | 21 | 1639 | 1 | 1639 | 158 | 158 | 145 | 1 | 28 | 29 | 85 |
| | | 12/12/97 | 2.0 | | | | | | | | | | | |
| 12 | HHFBY69 | 209852 | Uni-ZAP XR | 22 | 1860 | 2 | 1860 | 71 | 71 | 146 | 1 | 25 | 26 | 399 |
| | | 05/07/98 | | | | | | | | | | | | |
| 12 | HCEFL57 | 209551 | Uni-ZAP XR | 123 | 1034 | 1 | 1032 | 68 | 68 | 247 | 1 | 25 | 26 | 105 |
| | | 12/12/97 | | | | | | | | | | | | |
| 13 | HHENQ22 | 209511 | pCMVSport | 23 | 1899 | 1 | 1899 | 115 | 115 | 147 | 1 | 36 | 37 | 58 |
| | | 12/03/97 | 3.0 | | | | | | | | | | | |
| 14 | HTLAI54 | 209463 | Uni-ZAP XR | 24 | 1451 | 1 | 1451 | 125 | 125 | 148 | 1 | 22 | 23 | 157 |
| | | 11/14/97 | | | | | | | | | | | | |
| 15 | HKABT24 | 209463 | pCMVSport | 25 | 2317 | 1 | 1809 | 66 | 66 | 149 | 1 | 22 | 23 | 553 |
| | | 11/14/97 | 2.0 | | | | | | | | | | | |
| 16 | HLWBF94 | 209463 | pCMVSport | 26 | 1472 | 1 | 1472 | 192 | 192 | 150 | 1 | 18 | 19 | 307 |
| | | 11/14/97 | 3.0 | | | | | | | | | | | |
| 17 | HKMLK53 | 209511 | pBluescript | 27 | 1543 | 1 | 1543 | 20 | 20 | 151 | 1 | 25 | 26 | 69 |
| | | 12/03/97 | | | | | | | | | | | | |
| 18 | HSYBG37 | 209463 | pCMVSport | 28 | 1239 | 1 | 1239 | 48 | 48 | 152 | 1 | 24 | 25 | 305 |
| | | 11/14/97 | 3.0 | | | | | | | | | | | |
| 19 | HTHCA77 | 209463 | Uni-ZAP XR | 29 | 1398 | 1 | 1398 | 154 | 154 | 153 | 1 | 24 | 25 | 304 |
| | | 11/14/97 | | | | | | | | | | | | |
| 19 | HTHCA77 | 209463 | Uni-ZAP XR | 124 | 1405 | 1 | 1405 | 160 | 160 | 248 | 1 | 24 | 25 | 219 |
| | | 11/14/97 | | | | | | | | | | | | |
| 20 | HSKGQ58 | 209511 | pBluescript | 30 | 2535 | 1410 | 2535 | 122 | 122 | 154 | 1 | 23 | 24 | 231 |
| | | 12/03/97 | | | | | | | | | | | | |
| 20 | HSKGQ58 | 209511 | pBluescript | 125 | 1133 | 1 | 1133 | 41 | 41 | 249 | 1 | 37 | 38 | 78 |
| | | 12/03/97 | | | | | | | | | | | | |
| 21 | HNFEG93 | 209511 | Uni-ZAP XR | 31 | 1490 | 1 | 1480 | 33 | 33 | 155 | 1 | 33 | 34 | 173 |
| | | 12/03/97 | | | | | | | | | | | | |
| 22 | HAIBZ39 | 209511 | Uni-ZAP XR | 32 | 1336 | 1 | 1336 | 48 | 48 | 156 | 1 | 17 | 18 | 63 |
| | | 12/03/97 | | | | | | | | | | | | |
| 23 | HFKFF78 | 209463 | Uni-ZAP XR | 33 | 2633 | 1651 | 2621 | 757 | 757 | 157 | 1 | 30 | 31 | 544 |
| | | 11/14/97 | | | | | | | | | | | | |
| 23 | HFKFF78 | 209463 | Uni-ZAP XR | 126 | 1016 | 1 | 961 | 92 | 92 | 250 | 1 | 18 | 19 | 166 |
| | | 11/14/97 | | | | | | | | | | | | |
| 24 | HNHEZ51 | 209463 | Uni-ZAP XR | 34 | 1534 | 1 | 1534 | 106 | 106 | 158 | 1 | 32 | 33 | 98 |
| | | 11/14/97 | | | | | | | | | | | | |
| 25 | HBXFP23 | 209511 | ZAP Express | 35 | 1705 | 178 | 1705 | 384 | 384 | 159 | 1 | 25 | 26 | 42 |
| | | 12/03/97 | | | | | | | | | | | | |
| 26 | HEQBF32 | 209511 | pCMVSport | 36 | 1031 | 1 | 1031 | 97 | 97 | 160 | 1 | 25 | 26 | 113 |
| | | 12/03/97 | 3.0 | | | | | | | | | | | |
| 27 | HETHE81 | 209511 | Uni-ZAP XR | 37 | 1642 | 519 | 1642 | 208 | 208 | 161 | 1 | 29 | 30 | 334 |
| | | 12/03/97 | | | | | | | | | | | | |
| 27 | HETHE81 | 209511 | Uni-ZAP XR | 127 | 1589 | 1 | 1589 | 182 | 182 | 251 | 1 | 23 | 24 | 155 |
| | | 12/03/97 | | | | | | | | | | | | |
| 28 | HFPAC12 | 209511 | Uni-ZAP XR | 38 | 1088 | 1 | 1088 | 140 | 140 | 162 | 1 | 21 | 22 | 88 |
| | | 12/03/97 | | | | | | | | | | | | |
| 29 | HDPFF39 | 209511 | pCMVSport | 39 | 1256 | 1 | 1256 | 175 | 175 | 163 | 1 | 18 | 19 | 196 |
| | | 12/03/97 | 3.0 | | | | | | | | | | | |
| 30 | HFXHD88 | 209511 | Lambda ZAP | 40 | 1602 | 1 | 1602 | 130 | 130 | 164 | 1 | 41 | 42 | 128 |
| | | 12/03/97 | II | | | | | | | | | | | |
| 31 | HFIAX46 | 209463 | pSport | 41 | 1233 | 1 | 1233 | 195 | 195 | 165 | 1 | 20 | 21 | 60 |
| | | 11/14/97 | 1 | | | | | | | | | | | |
| 32 | HFOXO72 | 209463 | pSport | 42 | 1090 | 1 | 862 | 240 | 240 | 166 | 1 | 32 | 33 | 247 |
| | | 11/14/97 | 1 | | | | | | | | | | | |
| 33 | HFOXV65 | 209511 | pSport | 43 | 938 | 1 | 938 | 204 | 204 | 167 | 1 | 26 | 27 | 154 |
| | | 12/03/97 | 1 | | | | | | | | | | | |
| 34 | HKADX21 | 209511 | pCMVSport | 44 | 1585 | 122 | 1585 | 414 | 414 | 168 | 1 | 18 | 19 | 106 |
| | | 12/03/97 | 2.0 | | | | | | | | | | | |
| 35 | HPZAB47 | 209511 | pBluescript | 45 | 1676 | 1 | 1676 | 34 | 34 | 169 | 1 | 18 | 19 | 47 |
| | | 12/03/97 | | | | | | | | | | | | |
| 36 | HAGFE79 | 209511 | Uni-ZAP XR | 46 | 1344 | 1 | 1344 | 133 | 133 | 170 | 1 | 18 | 19 | 126 |
| | | 12/03/97 | | | | | | | | | | | | |
| 37 | HCE1X60 | 209511 | Uni-ZAP XR | 47 | 1474 | 1 | 1474 | 38 | 38 | 171 | 1 | 25 | 26 | 86 |
| | | 12/03/97 | | | | | | | | | | | | |
| 38 | HMEKU83 | 209551 | Lambda ZAP | 48 | 839 | 1 | 839 | 35 | 35 | 172 | 1 | 28 | 29 | 194 |
| | | 12/12/97 | II | | | | | | | | | | | |
| 39 | HOSBY40 | 209551 | Uni-ZAP XR | 49 | 1145 | 1 | 1145 | 89 | 89 | 173 | 1 | 30 | 31 | 56 |
| | | 12/12/97 | | | | | | | | | | | | |
| 40 | HODDW40 | 209463 | Uni-ZAP XR | 50 | 682 | 1 | 682 | 139 | 139 | 174 | 1 | 19 | 20 | 40 |
| | | 11/14/97 | | | | | | | | | | | | |
| 41 | HSAWG42 | 209463 | Uni-ZAP XR | 51 | 770 | 1 | 770 | 31 | 31 | 175 | 1 | 27 | 28 | 74 |
| | | 11/14/97 | | | | | | | | | | | | |
| 42 | HBMSK09 | 209463 | Uni-ZAP XR | 52 | 565 | 1 | 565 | 67 | 67 | 176 | 1 | 28 | 29 | 74 |
| | | 11/14/97 | | | | | | | | | | | | |
| 43 | HDPAU16 | 209463 | pCMVSport | 53 | 1356 | 1 | 1356 | 486 | 486 | 177 | 1 | 24 | 25 | 57 |
| | | 11/14/97 | 3.0 | | | | | | | | | | | |
| 44 | HFEBE12 | 209463 | Uni-ZAP XR | 54 | 1168 | 17 | 631 | 113 | 113 | 178 | 1 | 22 | 23 | 238 |
| | | 11/14/97 | | | | | | | | | | | | |
| 44 | HFEBE12 | 209463 | Uni-ZAP XR | 128 | 617 | 3 | 617 | 99 | 99 | 252 | 1 | 22 | 23 | 173 |
| | | 11/14/97 | | | | | | | | | | | | |
| 45 | HFLNB64 | 209463 | Uni-ZAP XR | 55 | 648 | 1 | 648 | 62 | 62 | 179 | 1 | 39 | 40 | 45 |
| | | 11/14/97 | | | | | | | | | | | | |
| 46 | HSAWZ41 | 209463 | Uni-ZAP XR | 56 | 1388 | 1 | 1388 | 98 | 98 | 180 | 1 | 24 | 25 | 57 |
| | | 11/14/97 | | | | | | | | | | | | |
| 47 | HFXKD36 | 209511 | Lambda ZAP | 57 | 2012 | 130 | 2012 | 251 | 251 | 181 | 1 | 35 | 36 | 57 |
| | | 12/03/97 | II | | | | | | | | | | | |
| 48 | HKFBH93 | 209551 | ZAP Express | 58 | 2050 | 174 | 2050 | 262 | 262 | 182 | 1 | 18 | 19 | 72 |
| | | 12/12/97 | | | | | | | | | | | | |
| 49 | HMTAD67 | 209551 | pCMVSport | 59 | 1173 | 1 | 1173 | 306 | 306 | 183 | 1 | 19 | 20 | 84 |
| | | 12/12/97 | 3.0 | | | | | | | | | | | |
| 50 | HTEBP77 | 209551 | Uni-ZAP XR | 60 | 822 | 1 | 822 | 91 | 91 | 184 | 1 | 18 | 19 | 194 |
| | | 12/12/97 | | | | | | | | | | | | |
| 51 | HE9CO69 | 209551 | Uni-ZAP XR | 61 | 1077 | 1 | 1077 | 161 | 161 | 185 | 1 | 26 | 27 | 41 |
| | | 12/12/97 | | | | | | | | | | | | |
| 52 | HCACV51 | 209551 | Uni-ZAP XR | 62 | 2092 | 1 | 2092 | 173 | 173 | 186 | 1 | 31 | 32 | 281 |
| | | 12/12/97 | | | | | | | | | | | | |
| 53 | HNFJF07 | 209463 | Uni-ZAP XR | 63 | 616 | 1 | 616 | 86 | 86 | 187 | 1 | 21 | 22 | 66 |
| | | 11/14/97 | | | | | | | | | | | | |
| 54 | HNGJO57 | 209463 | Uni-ZAP XR | 64 | 828 | 1 | 828 | 87 | 87 | 188 | 1 | 18 | 19 | 52 |
| | | 11/14/97 | | | | | | | | | | | | |
| 55 | HE7TM22 | 209463 | Uni-ZAP XR | 65 | 581 | 1 | 581 | 70 | 70 | 189 | 1 | 22 | 23 | 65 |
| | | 11/14/97 | | | | | | | | | | | | |
| 56 | HFRBR70 | 209463 | Uni-ZAP XR | 66 | 789 | 1 | 789 | 40 | 40 | 190 | 1 | 20 | 21 | 56 |
| | | 11/14/97 | | | | | | | | | | | | |
| 57 | HTHBK35 | 209463 | Uni-ZAP XR | 67 | 884 | 1 | 884 | 108 | 108 | 191 | 1 | 26 | 27 | 66 |
| | | 11/14/97 | | | | | | | | | | | | |
| 58 | HWABA81 | 209463 | pCMVSport | 68 | 866 | 1 | 866 | 57 | 57 | 192 | 1 | 21 | 22 | 48 |
| | | 11/14/97 | 3.0 | | | | | | | | | | | |
| 59 | HHPBI45 | 209551 | Uni-ZAP XR | 69 | 1352 | 1 | 1352 | 123 | 123 | 193 | 1 | 20 | 21 | 47 |
| | | 12/12/97 | | | | | | | | | | | | |
| 60 | HLQDH79 | 209551 | Lambda ZAP | 70 | 913 | 1 | 913 | 205 | 205 | 194 | 1 | 19 | 20 | 58 |
| | | 12/12/97 | II | | | | | | | | | | | |
| 61 | HNGFJ67 | 209551 | Uni-ZAP XR | 71 | 721 | 1 | 721 | 344 | 344 | 195 | 1 | 21 | 22 | 42 |
| | | 12/12/97 | | | | | | | | | | | | |
| 62 | HFXKL58 | 209551 | Lambda ZAP | 72 | 563 | 1 | 563 | 120 | 120 | 196 | 1 | 17 | 18 | 67 |
| | | 12/12/97 | II | | | | | | | | | | | |
| 63 | HKGAA73 | 209463 | pSport | 73 | 1694 | 1 | 1694 | 38 | 38 | 197 | 1 | 27 | 28 | 88 |
| | | 11/14/97 | 1 | | | | | | | | | | | |
| 64 | HKIYP40 | 209463 | pBluescript | 74 | 1215 | 1 | 1215 | 43 | 43 | 198 | 1 | 32 | 33 | 76 |
| | | 11/14/97 | | | | | | | | | | | | |
| 65 | HKMMW74 | 209463 | pBluescript | 75 | 1794 | 1 | 1794 | 202 | 202 | 199 | 1 | 21 | 22 | 41 |
| | | 11/14/97 | | | | | | | | | | | | |
| 66 | HLFBI27 | 209463 | pBluescript | 76 | 1174 | 1 | 1174 | 135 | 135 | 200 | 1 | 19 | 20 | 45 |
| | | 11/14/97 | SK- | | | | | | | | | | | |
| 67 | HLQCW84 | 209463 | Lambda ZAP | 77 | 1087 | 1 | 1087 | 31 | 31 | 201 | 1 | 18 | 19 | 41 |
| | | 11/14/97 | II | | | | | | | | | | | |
| 68 | HBMCU71 | 209511 | pBluescript | 78 | 1267 | 1 | 1267 | 77 | 77 | 202 | 1 | 21 | 22 | 68 |
| | | 12/03/97 | | | | | | | | | | | | |
| 69 | HTEIV80 | 209511 | Uni-ZAP XR | 79 | 1748 | 1 | 1748 | 203 | 203 | 203 | 1 | 15 | 16 | 47 |
| | | 12/03/97 | | | | | | | | | | | | |
| 70 | HMVAM60 | 209551 | pSport | 80 | 1324 | 1 | 1324 | 96 | 96 | 204 | 1 | 26 | 27 | 56 |
| | | 12/12/97 | 1 | | | | | | | | | | | |
| 71 | HMVBR22 | 209551 | pSport | 81 | 1731 | 1 | 1731 | 104 | 104 | 205 | 1 | 20 | 21 | 55 |
| | | 12/12/97 | 1 | | | | | | | | | | | |
| 72 | HPJCW04 | 209551 | Uni-ZAP XR | 82 | 1466 | 1 | 1466 | 44 | 44 | 206 | 1 | 19 | 20 | 57 |
| | | 12/12/97 | | | | | | | | | | | | |
| 73 | HSIDJ81 | 209551 | Uni-ZAP XR | 83 | 1303 | 1 | 1303 | 8 | 8 | 207 | 1 | 22 | 23 | 58 |
| | | 12/12/97 | | | | | | | | | | | | |
| 74 | HSLFU05 | 209551 | Uni-ZAP XR | 84 | 1516 | 1 | 1516 | 166 | 166 | 208 | 1 | 30 | 31 | 44 |
| | | 12/12/97 | | | | | | | | | | | | |
| 75 | HEQAK71 | 209551 | pCMVSport | 85 | 1689 | 1 | 1689 | 198 | 198 | 209 | 1 | 17 | 18 | 44 |
| | | 12/12/97 | 3.0 | | | | | | | | | | | |
| 76 | HBNAV22 | 209463 | Uni-ZAP XR | 86 | 438 | 1 | 438 | 13 | 13 | 210 | 1 | 40 | 41 | 43 |
| | | 11/14/97 | | | | | | | | | | | | |
| 77 | HEIAC52 | 209551 | Uni-ZAP XR | 87 | 5278 | 680 | 1337 | 760 | 760 | 211 | 1 | 18 | 19 | 52 |
| | | 12/12/97 | | | | | | | | | | | | |
| 77 | HEIAC52 | 209551 | Uni-ZAP XR | 129 | 645 | 1 | 645 | 81 | 81 | 253 | 1 | 18 | 19 | 52 |
| | | 12/12/97 | | | | | | | | | | | | |
| 78 | HTEAM34 | 209463 | Uni-ZAP XR | 88 | 734 | 1 | 734 | 63 | 63 | 212 | 1 | 28 | 29 | 122 |
| | | 11/14/97 | | | | | | | | | | | | |
| 79 | HTHDK34 | 209463 | Uni-ZAP XR | 89 | 1346 | 1 | 1346 | 60 | 60 | 213 | 1 | 35 | 36 | 41 |
| | | 11/14/97 | | | | | | | | | | | | |
| 80 | H6BSG32 | 209463 | Uni-ZAP XR | 90 | 998 | 53 | 998 | 209 | 209 | 214 | 1 | 24 | 25 | 55 |
| | | 11/14/97 | | | | | | | | | | | | |
| 81 | HDTEN81 | 209463 | pCMVSport | 91 | 566 | 1 | 566 | 114 | 114 | 215 | 1 | 17 | 18 | 85 |
| | | 11/14/97 | 2.0 | | | | | | | | | | | |
| 82 | HFXDT43 | 209463 | Lambda ZAP | 92 | 1277 | 1 | 1277 | 92 | 92 | 216 | 1 | 19 | 20 | 44 |
| | | 11/14/97 | II | | | | | | | | | | | |
| 83 | HFIAP16 | 209511 | pSport | 93 | 1570 | 38 | 1570 | 44 | 44 | 217 | 1 | 30 | 31 | 50 |
| | | 12/03/97 | 1 | | | | | | | | | | | |
| 84 | HODAV86 | 209511 | Uni-ZAP XR | 94 | 524 | 1 | 524 | 153 | 153 | 218 | 1 | 28 | 29 | 55 |
| | | 12/03/97 | | | | | | | | | | | | |
| 85 | HTEDF80 | 209511 | Uni-ZAP XR | 95 | 1306 | 1 | 1306 | 696 | 696 | 219 | 1 | 21 | 22 | 126 |
| | | 12/03/97 | | | | | | | | | | | | |
| 86 | HTODJ69 | 209511 | Uni-ZAP XR | 96 | 1479 | 1 | 1479 | 123 | 123 | 220 | 1 | 23 | 24 | 69 |
| | | 12/03/97 | | | | | | | | | | | | |
| 87 | HE6GR02 | 209511 | Uni-ZAP XR | 97 | 1794 | 1 | 1794 | 100 | 100 | 221 | 1 | 18 | 19 | 70 |
| | | 12/03/97 | | | | | | | | | | | | |
| 88 | HOSEQ49 | 209551 | Uni-ZAP XR | 98 | 1943 | 280 | 1935 | 544 | 544 | 222 | 1 | 32 | 33 | 51 |
| | | 12/12/97 | | | | | | | | | | | | |
| 89 | HRAAM50 | 209551 | pCMVSport | 99 | 1594 | 1 | 1594 | 29 | 29 | 223 | 1 | 14 | 15 | 72 |
| | | 12/12/97 | 3.0 | | | | | | | | | | | |
| 90 | HSDFW45 | 209551 | Uni-ZAP XR | 100 | 1742 | 1 | 1742 | 118 | 118 | 224 | 1 | 19 | 20 | 70 |
| | | 12/12/97 | | | | | | | | | | | | |
| 91 | HSLCQ82 | 209551 | Uni-ZAP XR | 101 | 1501 | 1 | 1501 | 233 | 233 | 225 | 1 | 22 | 23 | 57 |
| | | 12/12/97 | | | | | | | | | | | | |
| 92 | HSSFT08 | 209551 | Uni-ZAP XR | 102 | 791 | 1 | 791 | 125 | 125 | 226 | 1 | 34 | 35 | 58 |
| | | 12/12/97 | | | | | | | | | | | | |
| 93 | HNGHQ09 | 209463 | Uni-ZAP XR | 103 | 442 | 1 | 442 | 65 | 65 | 227 | 1 | 17 | 18 | 68 |
| | | 11/14/97 | | | | | | | | | | | | |
| 94 | HHGDF16 | 209463 | Lambda ZAP | 104 | 890 | 215 | 890 | 253 | 253 | 228 | 1 | 26 | 27 | 52 |
| | | 11/14/97 | II | | | | | | | | | | | |
| 95 | HJBCG12 | 209463 | pBluescript | 105 | 737 | 40 | 737 | 382 | 382 | 229 | 1 | 24 | 25 | 56 |
| | | 11/14/97 | SK- | | | | | | | | | | | |
| 96 | HAPNY86 | 209511 | Uni-ZAP XR | 106 | 1280 | 1 | 1280 | 100 | 100 | 230 | 1 | 25 | 26 | 129 |
| | | 12/03/97 | | | | | | | | | | | | |
| 97 | HTLDR33 | 209511 | Uni-ZAP XR | 107 | 833 | 372 | 833 | 60 | 60 | 231 | 1 | 30 | 31 | 180 |
| | | 12/03/97 | | | | | | | | | | | | |
| 97 | HTLDR33 | 209511 | Uni-ZAP XR | 130 | 974 | 1 | 974 | 368 | 368 | 254 | 1 | 19 | 20 | 54 |
| | | 12/03/97 | | | | | | | | | | | | |
| 98 | HCFAD33 | 209463 | pSport | 108 | 1641 | 716 | 1335 | 939 | 939 | 232 | 1 | 23 | 24 | 50 |
| | | 11/14/97 | 1 | | | | | | | | | | | |
| 98 | HCFAD33 | 209463 | pSport | 131 | 658 | 1 | 658 | 297 | 297 | 255 | 1 | 17 | 18 | 44 |
| | | 11/14/97 | 1 | | | | | | | | | | | |
| 99 | HOGAW62 | 209463 | pCMVSport | 109 | 571 | 1 | 571 | 259 | 259 | 233 | 1 | 26 | 27 | 55 |
| | | 11/14/97 | 2.0 | | | | | | | | | | | |
| 100 | HTOIW31 | 209551 | Uni-ZAP XR | 110 | 1637 | 1 | 1637 | 107 | 107 | 234 | 1 | 19 | 20 | 42 |
| | | 12/12/97 | | | | | | | | | | | | |
| 101 | HTXKQ85 | 209551 | Uni-ZAP XR | 111 | 1588 | 1 | 1588 | 61 | 61 | 235 | 1 | 28 | 29 | 40 |
| | | 12/12/97 | | | | | | | | | | | | |
| 102 | HUFBK08 | 209551 | pSport | 112 | 1926 | 1 | 1926 | 114 | 114 | 236 | 1 | 17 | 18 | 41 |
| | | 12/12/97 | 1 | | | | | | | | | | | |
| 103 | HAJAW31 | 209551 | pCMVSport | 113 | 2274 | 1427 | 2274 | 121 | 121 | 237 | 1 | 30 | 31 | 609 |
| | | 12/12/97 | 3.0 | | | | | | | | | | | |
| 103 | HAJAW31 | 209551 | pCMVSport | 132 | 1063 | 1 | 1063 | 41 | 41 | 256 | 1 | 22 | 23 | 164 |
| | | 12/12/97 | 3.0 | | | | | | | | | | | |
| 104 | HBJEE48 | 209551 | Uni-ZAP XR | 114 | 1615 | 1 | 1615 | 97 | 97 | 238 | 1 | 43 | 44 | 51 |
| | | 12/12/97 | | | | | | | | | | | | |
| 105 | HBXGH74 | 209551 | ZAP Express | 115 | 1221 | 1 | 1221 | 188 | 188 | 239 | 1 | 20 | 21 | 129 |
| | | 12/12/97 | | | | | | | | | | | | |
| 106 | HWBDM68 | 209551 | pCMVSport | 116 | 1149 | 1 | 1130 | 368 | 368 | 240 | 1 | 24 | 25 | 54 |
| | | 12/12/97 | 3.0 | | | | | | | | | | | |
| 107 | HACBI61 | 209511 | Uni-ZAP XR | 117 | 1955 | 1 | 1955 | 174 | 174 | 241 | 1 | 16 | 17 | 79 |
| | | 12/03/97 | | | | | | | | | | | | |
| 108 | HMEIK34 | 209511 | Lambda ZAP | 118 | 1135 | 523 | 1135 | 2 | 2 | 242 | 1 | 1 | 2 | 166 |
| | | 12/03/97 | II | | | | | | | | | | | |
| 108 | HMEIK34 | 209511 | Lambda ZAP | 135 | 638 | 1 | 638 | 243 | 243 | 257 | 1 | 24 | 25 | 41 |
| | | 12/03/97 | II | | | | | | | | | | | |
| 109 | HSWBJ74 | 209463 | pCMVSport | 119 | 2593 | 1578 | 1923 | 1520 | 1520 | 243 | 1 | 65 | 66 | 77 |
| | | 11/14/97 | 3.0 | | | | | | | | | | | |
| 109 | HSWBJ74 | 209463 | pCMVSport | 134 | 356 | 1 | 356 | 43 | 43 | 258 | 1 | 35 | 36 | 47 |
| | | 11/14/97 | 3.0 | | | | | | | | | | | |

[0873] Table 1 summarizes the information corresponding to each “Gene No.” described above. The nucleotide sequence identified as “NT SEQ ID NO:X” was assembled from partially homologous (“overlapping”) sequences obtained from the “cDNA clone ID” identified in Table 1 and, in some cases, from additional related DNA clones. The overlapping sequences were assembled into a single contiguous sequence of high redundancy (usually three to five overlapping sequences at each nucleotide position), resulting in a final sequence identified as SEQ ID NO:X.

[0874] The cDNA Clone ID was deposited on the date and given the corresponding deposit number listed in “ATCC Deposit No:Z and Date.” Some of the deposits contain multiple different clones corresponding to the same gene. “Vector” refers to the type of vector contained in the cDNA Clone ID.

[0875] “Total NT Seq.” refers to the total number of nucleotides in the contig identified by “Gene No.” The deposited clone may contain all or most of these sequences, reflected by the nucleotide position indicated as “5′ NT of Clone Seq.” and the “3′ NT of Clone Seq.” of SEQ ID NO:X. The nucleotide position of SEQ ID NO:X of the putative start codon (methionine) is identified as “5′ NT of Start Codon.” Similarly, the nucleotide position of SEQ ID NO:X of the predicted signal sequence is identified as “5′ NT of First AA of Signal Pep.”

[0876] The translated amino acid sequence, beginning with the methionine, is identified as “AA SEQ ID NO:Y,” although other reading frames can also be easily translated using known molecular biology techniques. The polypeptides produced by these alternative open reading frames are specifically contemplated by the present invention.

[0877] The first and last amino acid position of SEQ ID NO:Y of the predicted signal peptide is identified as “First AA of Sig Pep” and “Last AA of Sig Pep.” The predicted first amino acid position of SEQ ID NO:Y of the secreted portion is identified as “Predicted First AA of Secreted Portion.” Finally, the amino acid position of SEQ ID NO:Y of the last amino acid in the open reading frame is identified as “Last AA of ORF.”

[0878] SEQ ID NO:X and the translated SEQ ID NO:Y are sufficiently accurate and otherwise suitable for a variety of uses well known in the art and described further below. For instance, SEQ ID NO:X is useful for designing nucleic acid hybridization probes that will detect nucleic acid sequences contained in SEQ ID NO:X or the cDNA contained in the deposited clone. These probes will also hybridize to nucleic acid molecules in biological samples, thereby enabling a variety of forensic and diagnostic methods of the invention. Similarly, polypeptides identified from SEQ ID NO:Y may be used to generate antibodies which bind specifically to the secreted proteins encoded by the cDNA clones identified in Table 1.

[0879] Nevertheless, DNA sequences generated by sequencing reactions can contain sequencing errors. The errors exist as misidentified nucleotides, or as insertions or deletions of nucleotides in the generated DNA sequence. The erroneously inserted or deleted nucleotides cause frame shifts in the reading frames of the predicted amino acid sequence. In these cases, the predicted amino acid sequence diverges from the actual amino acid sequence, even though the generated DNA sequence may be greater than 99.9% identical to the actual DNA sequence (for example, one base insertion or deletion in an open reading frame of over 1000 bases).

[0880] Accordingly, for those applications requiring precision in the nucleotide sequence or the amino acid sequence, the present invention provides not only the generated nucleotide sequence identified as SEQ ID NO:X and the predicted translated amino acid sequence identified as SEQ ID NO:Y, but also a sample of plasmid DNA containing a human cDNA of the invention deposited with the ATCC, as set forth in Table 1. The nucleotide sequence of each deposited clone can readily be determined by sequencing the deposited clone in accordance with known methods. The predicted amino acid sequence can then be verified from such deposits. Moreover, the amino acid sequence of the protein encoded by a particular clone can also be directly determined by peptide sequencing or by expressing the protein in a suitable host cell containing the deposited human cDNA, collecting the protein, and determining its sequence.

[0881] The present invention also relates to the genes corresponding to SEQ ID NO:X, SEQ ID NO:Y, or the deposited clone. The corresponding gene can be isolated in accordance with known methods using the sequence information disclosed herein. Such methods include preparing probes or primers from the disclosed sequence and identifying or amplifying the corresponding gene from appropriate sources of genomic material.

[0882] Also provided in the present invention are species homologs. Species homologs may be isolated and identified by making suitable probes or primers from the sequences provided herein and screening a suitable nucleic acid source for the desired homologue.

[0883] The polypeptides of the invention can be prepared in any suitable manner. Such polypeptides include isolated naturally occurring polypeptides, recombinantly produced polypeptides, synthetically produced polypeptides, or polypeptides produced by a combination of these methods. Means for preparing such polypeptides are well understood in the art.

[0884] The polypeptides may be in the form of the secreted protein, including the mature form, or may be a part of a larger protein, such as a fusion protein (see below). It is often advantageous to include an additional amino acid sequence which contains secretory or leader sequences, pro-sequences, sequences which aid in purification, such as multiple histidine residues, or an additional sequence for stability during recombinant production.

[0885] The polypeptides of the present invention are preferably provided in an isolated form, and preferably are substantially purified. A recombinantly produced version of a polypeptide, including the secreted polypeptide, can be substantially purified by the one-step method described in Smith and Johnson, Gene 67:31-40 (1988). Polypeptides of the invention also can be purified from natural or recombinant sources using antibodies of the invention raised against the secreted protein in methods which are well known in the art.

[0886] Signal Sequences

[0887] Methods for predicting whether a protein has a signal sequence, as well as the cleavage point for that sequence, are available. For instance, the method of McGeoch, Virus Res. 3:271-286 (1985), uses the information from a short N-terminal charged region and a subsequent uncharged region of the complete (uncleaved) protein. The method of von Heinje, Nucleic Acids Res. 14:4683-4690 (1986) uses the information from the residues surrounding the cleavage site, typically residues −13 to +2, where+1 indicates the amino terminus of the secreted protein. The accuracy of predicting the cleavage points of known mammalian secretory proteins for each of these methods is in the range of 75-80%. (von Heinje, supra.) However, the two methods do not always produce the same predicted cleavage point(s) for a given protein.

[0888] In the present case, the deduced amino acid sequence of the secreted polypeptide was analyzed by a computer program called SignalP (Henrik Nielsen et al., Protein Engineering 10:1-6 (1997)), which predicts the cellular location of a protein based on the amino acid sequence. As part of this computational prediction of localization, the methods of McGeoch and von Heinje are incorporated. The analysis of the amino acid sequences of the secreted proteins described herein by this program provided the results shown in Table 1.

[0889] As one of ordinary skill would appreciate, however, cleavage sites sometimes vary from organism to organism and cannot be predicted with absolute certainty. Accordingly, the present invention provides secreted polypeptides having a sequence shown in SEQ ID NO:Y which have an N-terminus beginning within 5 residues (i.e., +or −5 residues) of the predicted cleavage point. Similarly, it is also recognized that in some cases, cleavage of the signal sequence from a secreted protein is not entirely uniform, resulting in more than one secreted species. These polypeptides, and the polynucleotides encoding such polypeptides, are contemplated by the present invention.

[0890] Moreover, the signal sequence identified by the above analysis may not necessarily predict the naturally occurring signal sequence. For example, the naturally occurring signal sequence may be further upstream from the predicted signal sequence. However, it is likely that the predicted signal sequence will be capable of directing the secreted protein to the ER. These polypeptides, and the polynucleotides encoding such polypeptides, are contemplated by the present invention.

[0891] Polynucleotide and Polypeptide Variants

[0892] “Variant” refers to a polynucleotide or polypeptide differing from the polynucleotide or polypeptide of the present invention, but retaining essential properties thereof. Generally, variants are overall closely similar, and, in many regions, identical to the polynucleotide or polypeptide of the present invention.

[0893] By a polynucleotide having a nucleotide sequence at least, for example, 95% “identical” to a reference nucleotide sequence of the present invention, it is intended that the nucleotide sequence of the polynucleotide is identical to the reference sequence except that the polynucleotide sequence may include up to five point mutations per each 100 nucleotides of the reference nucleotide sequence encoding the polypeptide. In other words, to obtain a polynucleotide having a nucleotide sequence at least 95% identical to a reference nucleotide sequence, up to 5% of the nucleotides in the reference sequence may be deleted or substituted with another nucleotide, or a number of nucleotides up to 5% of the total nucleotides in the reference sequence may be inserted into the reference sequence. The query sequence may be an entire sequence shown in Table 1, the ORF (open reading frame), or any fragment specified as described herein.

[0894] As a practical matter, whether any particular nucleic acid molecule or polypeptide is at least 90%, 95%, 96%, 97%, 98% or 99% identical to a nucleotide sequence of the presence invention can be determined conventionally using known computer programs. A preferred method for determing the best overall match between a query sequence (a sequence of the present invention) and a subject sequence, also referred to as a global sequence alignment, can be determined using the FASTDB computer program based on the algorithm of Brutlag et al. (Comp. App. Biosci. (1990) 6:237-245). In a sequence alignment the query and subject sequences are both DNA sequences. An RNA sequence can be compared by converting U's to T's. The result of said global sequence alignment is in percent identity. Preferred parameters used in a FASTDB alignment of DNA sequences to calculate percent idently are: Matrix=Unitary, k-tuple=4, Mismatch Penalty=1, Joining Penalty=30, Randomization Group Length=0, Cutoff Score=1, Gap Penalty=5, Gap Size Penalty 0.05, Window Size=500 or the lenght of the subject nucleotide sequence, whichever is shorter.

[0895] If the subject sequence is shorter than the query sequence because of 5′ or 3′ deletions, not because of internal deletions, a manual correction must be made to the results. This is because the FASTDB program does not account for 5′ and 3′ truncations of the subject sequence when calculating percent identity. For subject sequences truncated at the 5′ or 3′ ends, relative to the the query sequence, the percent identity is corrected by calculating the number of bases of the query sequence that are 5′ and 3′ of the subject sequence, which are not matched/aligned, as a percent of the total bases of the query sequence. Whether a nucleotide is matched/aligned is determined by results of the FASTDB sequence alignment. This percentage is then subtracted from the percent identity, calculated by the above FASTDB program using the specified parameters, to arrive at a final percent identity score. This corrected score is what is used for the purposes of the present invention. Only bases outside the 5′ and 3′ bases of the subject sequence, as displayed by the FASTDB alignment, which are not matched/aligned with the query sequence, are calculated for the purposes of manually adjusting the percent identity score.

[0896] For example, a 90 base subject sequence is aligned to a 100 base query sequence to determine percent identity. The deletions occur at the 5′ end of the subject sequence and therefore, the FASTDB alignment does not show a matched/alignement of the first 10 bases at 5′ end. The 10 unpaired bases represent 10% of the sequence (number of bases at the 5′ and 3′ ends not matched/total number of bases in the query sequence) so 10% is subtracted from the percent identity score calculated by the FASTDB program. If the remaining 90 bases were perfectly matched the final percent identity would be 90%. In another example, a 90 base subject sequence is compared with a 100 base query sequence. This time the deletions are internal deletions so that there are no bases on the 5′ or 3′ of the subject sequence which are not matched/aligned with the query. In this case the percent identity calculated by FASTDB is not manually corrected. Once again, only bases 5′ and 3′ of the subject sequence which are not matched/aligned with the query sequnce are manually corrected for. No other manual corrections are to made for the purposes of the present invention.

[0897] By a polypeptide having an amino acid sequence at least, for example, 95% “identical” to a query amino acid sequence of the present invention, it is intended that the amino acid sequence of the subject polypeptide is identical to the query sequence except that the subject polypeptide sequence may include up to five amino acid alterations per each 100 amino acids of the query amino acid sequence. In other words, to obtain a polypeptide having an amino acid sequence at least 95% identical to a query amino acid sequence, up to 5% of the amino acid residues in the subject sequence may be inserted, deleted, (indels) or substituted with another amino acid. These alterations of the reference sequence may occur at the amino or carboxy terminal positions of the reference amino acid sequence or anywhere between those terminal positions, interspersed either individually among residues in the reference sequence or in one or more contiguous groups within the reference sequence.

[0898] As a practical matter, whether any particular polypeptide is at least 90%, 95%, 96%, 97%, 98% or 99% identical to, for instance, the amino acid sequences shown in Table 1 or to the amino acid sequence encoded by deposited DNA clone can be determined conventionally using known computer programs. A preferred method for determing the best overall match between a query sequence (a sequence of the present invention) and a subject sequence, also referred to as a global sequence alignment, can be determined using the FASTDB computer program based on the algorithm of Brutlag et al. (Comp. App. Biosci. (1990) 6:237-245). In a sequence alignment the query and subject sequences are either both nucleotide sequences or both amino acid sequences. The result of said global sequence alignment is in percent identity. Preferred parameters used in a FASTDB amino acid alignment are: Matrix=PAM 0, k-tuple=2, Mismatch Penalty=1, Joining Penalty=20, Randomization Group Length=0, Cutoff Score=1, Window Size=sequence length, Gap Penalty=5, Gap Size Penalty=0.05, Window Size=500 or the length of the subject amino acid sequence, whichever is shorter.

[0899] If the subject sequence is shorter than the query sequence due to N- or C-terminal deletions, not because of internal deletions, a manual correction must be made to the results. This is becuase the FASTDB program does not account for N- and C-terminal truncations of the subject sequence when calculating global percent identity. For subject sequences truncated at the N- and C-termini, relative to the the query sequence, the percent identity is corrected by calculating the number of residues of the query sequence that are N- and C-terminal of the subject sequence, which are not matched/aligned with a corresponding subject residue, as a percent of the total bases of the query sequence. Whether a residue is matched/aligned is determined by results of the FASTDB sequence alignment. This percentage is then subtracted from the percent identity, calculated by the above FASTDB program using the specified parameters, to arrive at a final percent identity score. This final percent identity score is what is used for the purposes of the present invention. Only residues to the N- and C-termini of the subject sequence, which are not matched/aligned with the query sequence, are considered for the purposes of manually adjusting the percent identity score. That is, only query residue positions outside the farthest N- and C-terminal residues of the subject sequence.

[0900] For example, a 90 amino acid residue subject sequence is aligned with a 100 residue query sequence to determine percent identity. The deletion occurs at the N- terminus of the subject sequence and therefore, the FASTDB alignment does not show a matching/alignment of the first 10 residues at the N-terminus. The 10 unpaired residues represent 10% of the sequence (number of residues at the N- and C-termini not matched/total number of residues in the query sequence) so 10% is subtracted from the percent identity score calculated by the FASTDB program. If the remaining 90 residues were perfectly matched the final percent identity would be 90%. In another example, a 90 residue subject sequence is compared with a 100 residue query sequence. This time the deletions are internal deletions so there are no residues at the N- or C-termini of the subject sequence which are not matched/aligned with the query. In this case the percent identity calculated by FASTDB is not manually corrected. Once again, only residue positions outside the N- and C-terminal ends of the subject sequence, as displayed in the FASTDB alignment, which are not matched/aligned with the query sequnce -are manually corrected for. No other manual corrections are to made for the purposes of the present invention.

[0901] The variants may contain alterations in the coding regions, non-coding regions, or both. Especially preferred are polynucleotide variants containing alterations which produce silent substitutions. additions, or deletions, but do not alter the properties or activities of the encoded polypeptide. Nucleotide variants produced by silent substitutions due to the degeneracy of the genetic code,are preferred. Moreover, variants in which 5-10, 1-5, or 1-2 amino acids are substituted, deleted, or added in any combination are also preferred. Polynucleotide variants can be produced for a variety of reasons, e.g., to optimize codon expression for a particular host (change codons in the human mRNA to those preferred by a bacterial host such as E. coli).

[0902] Naturally occurring variants are called “allelic variants,” and refer to one of several alternate forms of a gene occupying a given locus on a chromosome of an organism. (Genes II, Lewin, B., ed., John Wiley & Sons, New York (1985).) These allelic variants can vary at either the polynucleotide and/or polypeptide level. Alternatively, non-naturally occurring variants may be produced by mutagenesis techniques or by direct synthesis.

[0903] Using known methods of protein engineering and recombinant DNA technology, variants may be generated to improve or alter the characteristics of the polypeptides of the present invention. For instance, one or more amino acids can be deleted from the N-terminus or C-terminus of the secreted protein without substantial loss of biological function. The authors of Ron et al., J. Biol. Chem. 268: 2984-2988 (1993), reported variant KGF proteins having heparin binding activity even after deleting 3, 8, or 27 amino-terminal amino acid residues. Similarly, Interferon gamma exhibited up to ten times higher activity after deleting 8-10 amino acid residues from the carboxy terminus of this protein. (Dobeli et al., J. Biotechnology 7:199-216 (1988).)

[0904] Moreover, ample evidence demonstrates that variants often retain a biological activity similar to that of the naturally occurring protein. For example, Gayle and coworkers (J. Biol. Chem 268:22105-22111 (1993)) conducted extensive mutational analysis of human cytokine IL- 1a. They used random mutagenesis to generate over 3,500 individual IL-1a mutants that averaged 2.5 amino acid changes per variant over the entire length of the molecule. Multiple mutations were examined at every possible amino acid position. The Investigators found that “[m]ost of the molecule could be altered with little effect on either [binding or biological activity].” (See, Abstract.) In fact, only 23 unique amino acid sequences, out of more than 3,500 nucleotide sequences examined, produced a protein that significantly differed in activity from wild-type.

[0905] Furthermore, even if deleting one or more amino acids from the N-terminus or C-terminus of a polypeptide results in modification or loss of one or more biological functions, other biological activities may still be retained. For example, the ability of a deletion variant to induce and/or to bind antibodies which recognize the secreted form will likely be retained when less than the majority of the residues of the secreted form are removed from the N-terminus or C-terminus. Whether a particular polypeptide lacking N- or C-terminal residues of a protein retains such immunogenic activities can readily be determined by routine methods described herein and otherwise known in the art.

[0906] Thus, the invention further includes polypeptide variants which show substantial biological activity. Such variants include deletions, insertions, inversions, repeats, and substitutions selected according to general rules known in the art so as have little effect on activity. For example, guidance concerning how to make phenotypically silent amino acid substitutions is provided in Bowie, J. U. et al., Science 247:1306-1310 (1990), wherein the authors indicate that there are two main strategies for studying the tolerance of an amino acid sequence to change.

[0907] The first strategy exploits the tolerance of amino acid substitutions by natural selection during the process of evolution. By comparing amino acid sequences in different species, conserved amino acids can be identified. These conserved amino acids are likely important for protein function. In contrast, the amino acid positions where substitutions have been tolerated by natural selection indicates that these positions are not critical for protein function. Thus, positions tolerating amino acid substitution could be modified while still maintaining biological activity of the protein.

[0908] The second strategy uses genetic engineering to introduce amino acid changes at specific positions of a cloned gene to identify regions critical for protein function. For example, site directed mutagenesis or alanine-scanning mutagenesis (introduction of single alanine mutations at every residue in the molecule) can be used. (Cunningham and Wells, Science 244:1081-1085 (1989).) The resulting mutant molecules can then be tested for biological activity.

[0909] As the authors state, these two strategies have revealed that proteins are surprisingly tolerant of amino acid substitutions. The authors further indicate which amino acid changes are likely to be permissive at certain amino acid positions in the protein. For example, most buried (within the tertiary structure of the protein) amino acid residues require nonpolar side chains, whereas few features of surface side chains are generally conserved. Moreover, tolerated conservative amino acid substitutions involve replacement of the aliphatic or hydrophobic amino acids Ala, Val, Leu and Ile; replacement of the hydroxyl residues Ser and Thr; replacement of the acidic residues Asp and Glu; replacement of the amide residues Asn and Gln, replacement of the basic residues Lys, Arg, and His; replacement of the aromatic residues Phe, Tyr, and Trp, and replacement of the small-sized amino acids Ala, Ser, Thr, Met, and Gly.

[0910] Besides conservative amino acid substitution, variants of the present invention include (i) substitutions with one or more of the non-conserved amino acid residues, where the substituted amino acid residues may or may not be one encoded by the genetic code, or (ii) substitution with one or more of amino acid residues having a substituent group, or (iii) fusion of the mature polypeptide with another compound, such as a compound to increase the stability and/or solubility of the polypeptide (for example, polyethylene glycol), or (iv) fusion of the polypeptide with additional amino acids, such as an IgG Fc fusion region peptide, or leader or secretory sequence, or a sequence facilitating purification. Such variant polypeptides are deemed to be within the scope of those skilled in the art from the teachings herein.

[0911] For example, polypeptide variants containing amino acid substitutions of charged amino acids with other charged or neutral amino acids may produce proteins with improved characteristics, such as less aggregation. Aggregation of pharmaceutical formulations both reduces activity and increases clearance due to the aggregate's immunogenic activity. (Pinckard et al., Clin. Exp. Immunol. 2:33 1-340 (1967); Robbins et al., Diabetes 36: 838-845 (1987); Cleland et al., Crit. Rev. Therapeutic Drug Carrier Systems 10:307-377 (1993).)

[0912] A further embodiment of the invention relates to a potypeptide which comprises the amino acid sequence of the present invention having an amino acid sequence which contains at least one amino acid substitution, but not more than 50 amino acid substitutions, even more preferably, not more than 40 amino acid substitutions, still more preferably, not more than 30 amino acid substitutions, and still even more preferably, not more than 20 amino acid substitutions. Of course, in order of ever-increasing preference, it is highly preferable for a polypeptide to have an amino acid sequence which comprises the amino acid sequence of the present invention, which contains at least one, but not more than 10, 9, 8, 7, 6, 5, 4, 3, 2 or 1 amino acid substitutions. In specific embodiments, the number of additions, substitutions, and/or deletions in the amino acid sequence of the present invention or fragments thereof (e.g., the mature form and/or other fragments described herein), is 1-5, 5-10, 5-25, 5-50, 10-50 or 50-150, conservative amino acid substitutions are preferable.

[0913] Polynucleotide and Polypeptide Fragments

[0914] In the present invention, a “polynucleotide fragment” refers to a short polynucleotide having a nucleic acid sequence contained in the deposited clone or shown in SEQ ID NO:X. The short nucleotide fragments are preferably at least about 15 nt, and more preferably at least about 20 nt, still more preferably at least about 30 nt, and even more preferably, at least about 40 nt in length. A fragment “at least 20 nt in length,” for example, is intended to include 20 or more contiguous bases from the cDNA sequence contained in the deposited clone or the nucleotide sequence shown in SEQ ID NO:X. These nucleotide fragments are useful as diagnostic probes and primers as discussed herein. Of course, larger fragments (e.g., 50, 150, 500, 600, 2000 nucleotides) are preferred.

[0915] Moreover, representative examples of polynucleotide fragments of the invention, include, for example, fragments having a sequence from about nucleotide number 1-50, 51-100, 101-150, 151-200, 201-250, 251-300, 301-350, 351-400, 401-450, 451-500, 501-550, 551-600, 651-700, 701-750, 751-800, 800-850, 851-900, 901-950, 951-1000, 1001-1050, 1051-1100, 1101-1150, 1151-1200, 1201-1250, 1251-1300, 1301-1350, 1351-1400, 1401-1450, 1451-1500, 1501-1550, 1551-1600, 1601-1650, 1651-1700, 1701-1750, 1751-1800, 1801-1850, 1851-1900, 1901-1950, 1951-2000, or 2001 to the end of SEQ ID NO:X or the cDNA contained in the deposited clone. In this context “about” includes the particularly recited ranges, larger or smaller by several (5, 4, 3, 2, or 1) nucleotides, at either terminus or at both termini. Preferably, these fragments encode a polypeptide which has biological activity. More preferably, these polynucleotides can be used as probes or primers as discussed herein.

[0916] In the present invention, a “polypeptide fragment” refers to a short amino acid sequence contained in SEQ ID NO:Y or encoded by the cDNA contained in the deposited clone. Protein fragments may be “free-standing,” or comprised within a larger polypeptide of which the fragment forms a part or region, most preferably as a single continuous region. Representative examples of polypeptide fragments of the invention, include, for example, fragments from about amino acid number 1-20, 21-40, 41-60, 61-80, 81-100, 102-120, 121-140, 141-160, or 161 to the end of the coding region. Moreover, polypeptide fragments can be about 20, 30, 40, 50, 60, 70, 80, 90, 100, 110, 120, 130, 140, or 150 amino acids in length. In this context “about” includes the particularly recited ranges, larger or smaller by several (5, 4, 3, 2, or 1) amino acids, at either extreme or at both extremes.

[0917] Preferred polypeptide fragments include the secreted protein as well as the mature form. Further preferred polypeptide fragments include the secreted protein or the mature form having a continuous series of deleted residues from the amino or the carboxy terminus, or both. For example, any number of amino acids, ranging from 1-60, can be deleted from the amino terminus of either the secreted polypeptide or the mature form. Similarly, any number of amino acids, ranging from 1-30, can be deleted from the carboxy terminus of the secreted protein or mature form. Furthermore, any combination of the above amino and carboxy terminus deletions are preferred. Similarly, polynucleotide fragments encoding these polypeptide fragments are also preferred.

[0918] Also preferred are polypeptide and polynucleotide fragments characterized by structural or functional domains. such as fragments that comprise alpha-helix and alpha-helix forming regions, beta-sheet and beta-sheet-forming regions, turn and turn-forming regions, coil and coil-forming regions, hydrophilic regions, hydrophobic regions, alpha amphipathic regions, beta amphipathic regions, flexible regions, surface-forming regions, substrate binding region, and high antigenic index regions. Polypeptide fragments of SEQ ID NO:Y falling within conserved domains are specifically contemplated by the present invention. Moreover, polynucleotide fragments encoding these domains are also contemplated.

[0919] Other preferred fragments are biologically active fragments. Biologically active fragments are those exhibiting activity similar, but not necessarily identical, to an activity of the polypeptide of the present invention. The biological activity of the fragments may include an improved desired activity, or a decreased undesirable activity.

[0920] Epitopes & Antibodies

[0921] In the present invention, “epitopes” refer to polypeptide fragments having antigenic or immunogenic activity in an animal, especially in a human. A preferred embodiment of the present invention relates to a polypeptide fragment comprising an epitope, as well as the polynucleotide encoding this fragment. A region of a protein molecule to which an antibody can bind is defined as an “antigenic epitope.” In contrast, an “immunogenic epitope” is defined as a part of a protein that elicits an antibody response. (See, for instance, Geysen et al., Proc. Natl. Acad. Sci. USA 81:3998- 4002 (1983).)

[0922] Fragments which function as epitopes may be produced by any conventional means. (See, e.g., Houghten, R. A., Proc. Natl. Acad. Sci. USA 82:5131-5135 (1985) further described in U.S. Pat. No. 4,631,211.)

[0923] In the present invention, antigenic epitopes preferably contain a sequence of at least seven, more preferably at least nine, and most preferably between about 15 to about 30 amino acids. Antigenic epitopes are useful to raise antibodies, including monoclonal antibodies, that specifically bind the epitope. (See, for instance, Wilson et al., Cell 37:767-778 (1984); Sutcliffe, J. G et al., Science 219:660-666(1983).)

[0924] Similarly, immunogenic epitopes can be used to induce antibodies according to methods well known in the art. (See, for instance, Sutcliffe et al., supra; Wilson et al., supra; Chow, M. et al., Proc. Natl. Acad. Sci. USA 82:910-914; and Bittle, F. J. et al., J. Gen. Virol. 66:2347-2354 (1985).) A preferred immunogenic epitope includes the secreted protein. The immunogenic epitopes may be presented together with a carrier protein, such as an albumin, to an animal system (such as rabbit or mouse) or, if it is long enough (at least about 25 amino acids), without a carrier. However, immunogenic epitopes comprising as few as 8 to 10 amino acids have been shown to be sufficient to raise antibodies capable of binding to, at the very least, linear epitopes in a denatured polypeptide (e.g., in Western blotting.)

[0925] As used herein, the term “antibody” (Ab) or “monoclonal antibody” (Mab) is meant to include intact molecules as well as antibody fragments (such as, for example, Fab and F(ab′)2 fragments) which are capable of specifically binding to protein. Fab and F(ab′)2 fragments lack the Fc fragment of intact antibody, clear more rapidly from the circulation, and may have less non-specific tissue binding than an intact antibody. (Wahl et al., J. Nucl. Med. 24:316-325 (1983).) Thus, these fragments are preferred, as well as the products of a FAB or other immunoglobulin expression library. Moreover, antibodies of the present invention include chimeric, single chain, and humanized antibodies.

[0926] Fusion Proteins

[0927] Any polypeptide of the present invention can be used to generate fusion proteins. For example, the polypeptide of the present invention, when fused to a second protein, can be used as an antigenic tag. Antibodies raised against the polypeptide of the present invention can be used to indirectly detect the second protein by binding to the polypeptide. Moreover, because secreted proteins target cellular locations based on trafficking signals, the polypeptides of the present invention can be used as targeting molecules once fused to other proteins.

[0928] Examples of domains that can be fused to polypeptides of the present invention include not only heterologous signal sequences, but also other heterologous functional regions. The fusion does not necessarily need to be direct, but may occur through linker sequences.

[0929] Moreover, fusion proteins may also be engineered to improve characteristics of the polypeptide of the present invention. For instance, a region of additional amino acids, particularly charged amino acids, may be added to the N-terminus of the polypeptide to improve stability and persistence during purification from the host cell or subsequent handling and storage. Also, peptide moieties may be added to the polypeptide to facilitate purification. Such regions may be removed prior to final preparation of the polypeptide. The addition of peptide moieties to facilitate handling of polypeptides are familiar and routine techniques in the art.

[0930] Moreover, polypeptides of the present invention, including fragments, and specifically epitopes, can be combined with parts of the constant domain of immunoglobulins (IgG), resulting in chimeric polypeptides. These fusion proteins facilitate purification and show an increased half-life in vivo. One reported example describes chimeric proteins consisting of the first two domains of the human CD4-polypeptide and various domains of the constant regions of the heavy or light chains of mammalian immunoglobulins. (EP A 394,827; Traunecker et al., Nature 331:84-86 (1988).) Fusion proteins having disulfide-linked dimeric structures (due to the IgG) can also be more efficient in binding and neutralizing other molecules, than the monomeric secreted protein or protein fragment alone. (Fountoulakis et al., J. Biochem. 270:3958-3964 (1995).)

[0931] Similarly, EP-A-O 464 533 (Canadian counterpart 2045869) discloses fusion proteins comprising various portions of constant region of immunoglobulin molecules together with another human protein or part thereof. In many cases, the Fc part in a fusion protein is beneficial in therapy and diagnosis, and thus can result in, for example, improved pharmacokinetic properties. (EP-A 0232 262.) Alternatively, deleting the Fc part after the fusion protein has been expressed, detected, and purified, would be desired. For example, the Fc portion may hinder therapy and diagnosis if the fusion protein is used as an antigen for immunizations. In drug discovery, for example, human proteins, such as hIL-5, have been fused with Fc portions for the purpose of high-throughput screening assays to identify antagonists of hIL-5. (See, D. Bennett et al., J. Molecular Recognition 8:52-58 (1995); K. Johanson et al., J. Biol. Chem. 270:9459-9471 (1995).)

[0932] Moreover, the polypeptides of the present invention can be fused to marker sequences, such as a peptide which facilitates purification of the fused polypeptide. In preferred embodiments, the marker amino acid sequence is a hexa-histidine peptide, such as the tag provided in a pQE vector (QIAGEN, Inc., 9259 Eton Avenue, Chatsworth, Calif., 91311), among others, many of which are commercially available. As described in Gentz et al., Proc. Natl. Acad. Sci. USA 86:821-824 (1989), for instance, hexa-histidine provides for convenient purification of the fusion protein. Another peptide tag useful for purification, the “HA” tag, corresponds to an epitope derived from the influenza hemagglutinin protein. (Wilson et al., Cell 37:767 (1984).)

[0933] Thus, any of these above fusions can be engineered using the polynucleotides or the polypeptides of the present invention.

[0934] Vectors, Host Cells, and Protein Production

[0935] The present invention also relates to vectors containing the polynucleotide of the present invention, host cells, and the production of polypeptides by recombinant techniques. The vector may be, for example, a phage, plasmid, viral, or retroviral vector. Retroviral vectors may be replication competent or replication defective. In the latter case, viral propagation generally will occur only in complementing host cells.

[0936] The polynucleotides may be joined to a vector containing a selectable marker for propagation in a host. Generally, a plasmid vector is introduced in a precipitate, such as a calcium phosphate precipitate, or in a complex with a charged lipid. If the vector is a virus, it may be packaged in vitro using an appropriate packaging cell line and then transduced into host cells.

[0937] The polynucleotide insert should be operatively linked to an appropriate promoter, such as the phage lambda PL promoter, the E. coli lac, trp, phoA and tac promoters, the SV40 early and late promoters and promoters of retroviral LTRs. to name a few. Other suitable promoters will be known to the skilled artisan. The expression constructs will further contain sites for transcription initiation, termination, and, in the transcribed region, a ribosome binding site for translation. The coding portion of the transcripts expressed by the constructs will preferably include a translation initiating codon at the beginning and a termination codon (UAA, UGA or UAG) appropriately positioned at the end of the polypeptide to be translated.

[0938] As indicated, the expression vectors will preferably include at least one selectable marker. Such markers include dihydrofolate reductase, G418 or neomycin resistance for eukaryotic cell culture and tetracycline, kanamycin or ampicillin resistance genes for culturing in E. coli and other bacteria. Representative examples of appropriate hosts include, but are not limited to, bacterial cells, such as E. coli, Streptomyces and Salmonella typhimurium cells; fungal cells, such as yeast cells; insect cells such as Drosophila S2 and Spodoptera Sf9 cells; animal cells such as CHO, COS, 293, and Bowes melanoma cells; and plant cells. Appropriate culture mediums and conditions for the above-described host cells are known in the art.

[0939] Among vectors preferred for use in bacteria include pQE70, pQE60 and pQE-9, available from QIAGEN, Inc.; pBluescript vectors, Phagescript vectors, pNH8A, pNH16a, pNH18A, pNH46A, available from Stratagene Cloning Systems, Inc.; and ptrc99a, pKK223-3, pKK233-3, pDR540, pRIT5 available from Pharmacia Biotech, Inc. Among preferred eukaryotic vectors are pWLNEO, pSV2CAT, pOG44, pXT1 and pSG available from Stratagene; and pSVK3, pBPV, pMSG and pSVL available from Pharmacia. Other suitable vectors will be readily apparent to the skilled artisan.

[0940] Introduction of the construct into the host cell can be effected by calcium phosphate transfection, DEAE-dextran mediated transfection, cationic lipid-mediated transfection, electroporation, transduction, infection, or other methods. Such methods are described in many standard laboratory manuals, such as Davis et al., Basic Methods In Molecular Biology (1986). It is specifically contemplated that the polypeptides of the present invention may in fact be expressed by a host cell lacking a recombinant vector.

[0941] A polypeptide of this invention can be recovered and purified from recombinant cell cultures by well-known methods including ammonium sulfate or ethanol precipitation. acid extraction, anion or cation exchange chromatography, phosphocellulose chromatography, hydrophobic interaction chromatography, affinity chromatography, hydroxylapatite chromatography and lectin chromatography. Most preferably, high performance liquid chromatography (“HPLC”) is employed for purification.

[0942] Polypeptides of the present invention, and preferably the secreted form, can also be recovered from: products purified from natural sources, including bodily fluids, tissues and cells, whether directly isolated or cultured; products of chemical synthetic procedures; and products produced by recombinant techniques from a prokaryotic or eukaryotic host, including, for example, bacterial, yeast, higher plant, insect, and mammalian cells. Depending upon the host employed in a recombinant production procedure, the polypeptides of the present invention may be glycosylated or may be non-glycosylated. In addition, polypeptides of the invention may also include an initial modified methionine residue, in some cases as a result of host-mediated processes. Thus, it is well known in the art that the N-terminal methionine encoded by the translation initiation codon generally is removed with high efficiency from any protein after translation in all eukaryotic cells. While the N-terminal methionine on most proteins also is efficiently removed in most prokaryotes, for some proteins, this prokaryotic removal process is inefficient, depending on the nature of the amino acid to which the N-terminal methionine is covalently linked.

[0943] In addition to encompassing host cells containing the vector constructs discussed herein, the invention also encompasses primary, secondary, and immortalized host cells of vertebrate origin, particularly mammalian origin, that have been engineered to delete or replace endogenous genetic material (e.g., coding sequence), and/or to include genetic material (e.g., heterologous polynucleotide sequences) that is operably associated with the polynucleotides of the invention, and which activates, alters, and/or amplifies endogenous polynucleotides. For example, techniques known in the art may be used to operably associate heterologous control regions (e.g., promoter and/or enhancer) and endogenous polynucleotide sequences via homologous recombination (see, e.g., U.S. Pat. No. 5,641,670, issued Jun. 24, 1997; International Publication No. WO 96/29411 published Sep. 26, 1996; International Publication No. WO 94/12650, published Aug. 4, 1994; Koller et al., Proc. Natl. Acad. Sci. USA 86:8932-8935 (1989); and Zijistra et al., Nature 342:435-438 (1989), the disclosures of each of which are incorporated by reference in their entireties).

[0944] Uses of the Polynucleotides

[0945] Each of the polynucleotides identified herein can be used in numerous ways as reagents. The following description should be considered exemplary and utilizes known techniques.

[0946] The polynucleotides of the present invention are useful for chromosome identification. There exists an ongoing need to identify new chromosome markers, since few chromosome marking reagents, based on actual sequence data (repeat polymorphisms), are presently available. Each polynucleotide of the present invention can be used as a chromosome marker.

[0947] Briefly, sequences can be mapped to chromosomes by preparing PCR primers (preferably 15-25 bp) from the sequences shown in SEQ ID NO:X. Primers can be selected using computer analysis so that primers do not span more than one predicted exon in the genomic DNA. These primers are then used for PCR screening of somatic cell hybrids containing individual human chromosomes. Only those hybrids containing the human gene corresponding to the SEQ ID NO:X will yield an amplified fragment.

[0948] Similarly, somatic hybrids provide a rapid method of PCR mapping the polynucleotides to particular chromosomes. Three or more clones can be assigned per day using a single thermal cycler. Moreover, sublocalization of the polynucleotides can be achieved with panels of specific chromosome fragments. Other gene mapping strategies that can be used include in situ hybridization, prescreening with labeled flow-sorted chromosomes, and preselection by hybridization to construct chromosome specific-cDNA libraries.

[0949] Precise chromosomal location of the polynucleotides can also be achieved using fluorescence in situ hybridization (FISH) of a metaphase chromosomal spread. This technique uses polynucteotides as short as 500 or 600 bases; however, polynucleotides 2,000-4,000 bp are preferred. For a review of this technique, see Verma et al., “Human Chromosomes: a Manual of Basic Techniques,” Pergamon Press, New York (1988).

[0950] For chromosome mapping, the polynucleotides can be used individually (to mark a single chromosome or a single site on that chromosome) or in panels (for marking multiple sites and/or multiple chromosomes). Preferred polynucleotides correspond to the noncoding regions of the cDNAs because the coding sequences are more likely conserved within gene families, thus increasing the chance of cross hybridization during chromosomal mapping.

[0951] Once a polynucleotide has been mapped to a precise chromosomal location, the physical position of the polynucleotide can be used in linkage analysis. Linkage analysis establishes coinheritance between a chromosomal location and presentation of a particular disease. (Disease mapping data are found, for example, in V. McKusick, Mendelian Inheritance in Man (available on line through Johns Hopkins University Welch Medical Library).) Assuming 1 megabase mapping resolution and one gene per 20 kb, a cDNA precisely localized to a chromosomal region associated with the disease could be one of 50-500 potential causative genes.

[0952] Thus, once coinheritance is established, differences in the polynucleotide and the corresponding gene between affected and unaffected individuals can be examined. First, visible structural alterations in the chromosomes, such as deletions or translocations, are examined in chromosome spreads or by PCR. If no structural alterations exist, the presence of point mutations are ascertained. Mutations observed in some or all affected individuals, but not in normal individuals, indicates that the mutation may cause the disease. However, complete sequencing of the polypeptide and the corresponding gene from several normal individuals is required to distinguish the mutation from a polymorphism. If a new polymorphism is identified, this polymorphic polypeptide can be used for further linkage analysis.

[0953] Furthermore, increased or decreased expression of the gene in affected individuals as compared to unaffected individuals can be assessed using polynucleotides of the present invention. Any of these alterations (altered expression, chromosomal rearrangement, or mutation) can be used as a diagnostic or prognostic marker.

[0954] In addition to the foregoing, a polynucleotide can be used to control gene expression through triple helix formation or antisense DNA or RNA. Both methods rely on binding of the polynucleotide to DNA or RNA. For these techniques, preferred polynucleotides are usually 20 to 40 bases in length and complementary to either the region of the gene involved in transcription (triple helix—see Lee et al., Nucl. Acids Res. 6:3073 (1979); Cooney et al., Science 241:456 (1988); and Dervan et al., Science 251:1360 (1991) ) or to the mRNA itself (antisense—Okano, J. Neurochem. 56:560 (1991); Oligodeoxy-nucleotides as Antisense Inhibitors of Gene Expression, CRC Press, Boca Raton, Fla. (1988).) Triple helix formation optimally results in a shut-off of RNA transcription from DNA, while antisense RNA hybridization blocks translation of an mRNA molecule into polypeptide. Both techniques are effective in model systems, and the information disclosed herein can be used to design antisense or triple helix polynucleotides in an effort to treat disease.

[0955] Polynucleotides of the present invention are also useful in gene therapy. One goal of gene therapy is to insert a normal gene into an organism having a defective gene, in an effort to correct the genetic defect. The polynucleotides disclosed in the present invention offer a means of targeting such genetic defects in a highly accurate manner. Another goal is to insert a new gene that was not present in the host genome, thereby producing a new trait in the host cell.

[0956] The polynucleotides are also useful for identifying individuals from minute biological samples. The United States military, for example, is considering the use of restriction fragment length polymorphism (RFLP) for identification of its personnel. In this technique, an individual's genomic DNA is digested with one or more restriction enzymes, and probed on a Southern blot to yield unique bands for identifying personnel. This method does not suffer from the current limitations of “Dog Tags” which can be lost, switched, or stolen, making positive identification difficult. The polynucleotides of the present invention can be used as additional DNA markers for RFLP.

[0957] The polynucleotides of the present invention can also be used as an alternative to RFLP, by determining the actual base-by-base DNA sequence of selected portions of an individual's genome. These sequences can be used to prepare PCR primers for amplifying and isolating such selected DNA, which can then be sequenced. Using this technique, individuals can be identified because each individual will have a unique set of DNA sequences. Once an unique ID database is established for an individual, positive identification of that individual, living or dead, can be made from extremely small tissue samples.

[0958] Forensic biology also benefits from using DNA-based identification techniques as disclosed herein. DNA sequences taken from very small biological samples such as tissues, e.g., hair or skin, or body fluids, e.g., blood, saliva, semen, etc., can be amplified using PCR. In one prior art technique, gene sequences amplified from polymorphic loci, such as DQa class II HLA gene, are used in forensic biology to identify individuals. (Erlich, H., PCR Technology, Freeman and Co. (1992).) Once these specific polymorphic loci are amplified, they are digested with one or more restriction enzymes, yielding an identifying set of bands on a Southern blot probed with DNA corresponding to the DQa class II HLA gene. Similarly, polynucleotides of the present invention can be used as polymorphic markers for forensic purposes.

[0959] There is also a need for reagents capable of identifying the source of a particular tissue. Such need arises, for example, in forensics when presented with tissue of unknown origin. Appropriate reagents can comprise, for example, DNA probes or primers specific to particular tissue prepared from the sequences of the present invention. Panels of such reagents can identify tissue by species and/or by organ type. In a similar fashion, these reagents can be used to screen tissue cultures for contamination.

[0960] In the very least, the polynucleotides of the present invention can be used as molecular weight markers on Southern gels, as diagnostic probes for the presence of a specific MRNA in a particular cell type, as a probe to “subtract-out” known sequences in the process of discovering novel polynucleotides, for selecting and making oligomers for attachment to a “gene chip” or other support, to raise anti-DNA antibodies using DNA immunization techniques, and as an antigen to elicit an immune response.

[0961] Uses of the Polypeptides

[0962] Each of the polypeptides identified herein can be used in numerous ways. The following description should be considered exemplary and utilizes known techniques.

[0963] A polypeptide of the present invention can be used to assay protein levels in a biological sample using antibody-based techniques. For example, protein expression in tissues can be studied with classical immunohistological methods. (Jalkanen, M., et al., J. Cell. Biol. 101:976-985 (1985); Jalkanen, M., et al., J. Cell . Biol. 105:3087-3096 (1987).) Other antibody-based methods useful for detecting protein gene expression include immunoassays, such as the enzyme linked immunosorbent assay (ELISA) and the radioimmunoassay (RIA). Suitable antibody assay labels are known in the art and include enzyme labels, such as, glucose oxidase, and radioisotopes, such as iodine (125I, 121I), carbon (14C), sulfur (35S), tritium (3H), indium (112In), and technetium (99mTc), and fluorescent labels, such as fluorescein and rhodamine, and biotin.

[0964] In addition to assaying secreted protein levels in a biological sample, proteins can also be detected in vivo by imaging. Antibody labels or markers for in vivo imaging of protein include those detectable by X-radiography, NMR or ESR. For X-radiography, suitable labels include radioisotopes such as barium or cesium, which emit detectable radiation but are not overtly harmful to the subject. Suitable markers for NMR and ESR include those with a detectable characteristic spin, such as deuterium, which may be incorporated into the antibody by labeling of nutrients for the relevant hybridoma.

[0965] A protein-specific antibody or antibody fragment which has been labeled with an appropriate detectable imaging moiety, such as a radioisotope (for example, 131I, 112In, 99mTc), a radio-opaque substance, or a material detectable by nuclear magnetic resonance, is introduced (for example, parenterally, subcutaneously, or intraperitoneally) into the mammal. It will be understood in the art that the size of the subject and the imaging system used will determine the quantity of imaging moiety needed to produce diagnostic images. In the case of a radioisotope moiety, for a human subject, the quantity of radioactivity injected will normally range from about 5 to 20 millicuries of 99mTc. The labeled antibody or antibody fragment will then preferentially accumulate at the location of cells which contain the specific protein. In vivo tumor imaging is described in S. W. Burchiel et al., “Immunopharmacokinetics of Radiolabeled Antibodies and Their Fragments.” (Chapter 13 in Tumor Imaging: The Radiochemical Detection of Cancer, S. W. Burchiel and B. A. Rhodes, eds., Masson Publishing Inc. (1982).)

[0966] Thus, the invention provides a diagnostic method of a disorder, which involves (a) assaying the expression of a polypeptide of the present invention in cells or body fluid of an individual; (b) comparing the level of gene expression with a standard gene expression level, whereby an increase or decrease in the assayed polypeptide gene expression level compared to the standard expression level is indicative of a disorder.

[0967] Moreover, polypeptides of the present invention can be used to treat disease. For example, patients can be administered a polypeptide of the present invention in an effort to replace absent or decreased levels of the polypeptide (e.g., insulin), to supplement absent or decreased levels of a different polypeptide (e.g., hemoglobin S for hemoglobin B), to inhibit the activity of a polypeptide (e.g., an oncogene), to activate the activity of a polypeptide (e.g., by binding to a receptor), to reduce the activity of a membrane bound receptor by competing with it for free ligand (e.g., soluble TNF receptors used in reducing inflammation), or to bring about a desired response (e.g., blood vessel growth).

[0968] Similarly, antibodies directed to a polypeptide of the present invention can also be used to treat disease. For example, administration of an antibody directed to a polypeptide of the present invention can bind and reduce overproduction of the polypeptide. Similarly, administration of an antibody can activate the polypeptide, such as by binding to a polypeptide bound to a membrane (receptor).

[0969] At the very least, the polypeptides of the present invention can be used as molecular weight markers on SDS-PAGE gels or on molecular sieve gel filtration columns using methods well known to those of skill in the art. Polypeptides can also be used to raise antibodies, which in turn are used to measure protein expression from a recombinant cell, as a way of assessing transformation of the host cell. Moreover, the polypeptides of the present invention can be used to test the following biological activities.

[0970] Biological Activities

[0971] The polynucleotides and polypeptides of the present invention can be used in assays to test for one or more biological activities. If these polynucleotides and polypeptides do exhibit activity in a particular assay, it is likely that these molecules may be involved in the diseases associated with the biological activity. Thus, the polynucleotides and polypeptides could be used to treat the associated disease.

[0972] Immune Activity

[0973] A polypeptide or polynucleotide of the present invention may be useful in treating deficiencies or disorders of the immune system, by activating or inhibiting the proliferation, differentiation, or mobilization (chemotaxis) of immune cells. Immune cells develop through a process called hematopoiesis, producing myeloid (platelets, red blood cells, neutrophils, and macrophages) and lymphoid (B and T lymphocytes) cells from pluripotent stem cells. The etiology of these immune deficiencies or disorders may be genetic, somatic, such as cancer or some autoimmune disorders, acquired (e.g., by chemotherapy or toxins), or infectious. Moreover, a polynucleotide or polypeptide of the present invention can be used as a marker or detector of a particular immune system disease or disorder.

[0974] A polynucleotide or polypeptide of the present invention may be useful in treating or detecting deficiencies or disorders of hematopoietic cells. A polypeptide or polynucleotide of the present invention could be used to increase differentiation and proliferation of hematopoietic cells, including the pluripotent stem cells, in an effort to treat those disorders associated with a decrease in certain (or many) types hematopoietic cells. Examples of immunologic deficiency syndromes include, but are not limited to: blood protein disorders (e.g. agammaglobulinemia, dysgammaglobulinemia), ataxia telangiectasia, common variable immunodeficiency, Digeorge Syndrome, HIV infection, HTLV-BLV infection, leukocyte adhesion deficiency syndrome, lymphopenia, phagocyte bactericidal dysfunction, severe combined immunodeficiency (SCIDs), Wiskott-Aldrich Disorder, anemia, thrombocytopenia, or hemoglobinuria.

[0975] Moreover, a polypeptide or polynucleotide of the present invention could also be used to modulate hemostatic (the stopping of bleeding) or thrombolytic activity (clot formation). For example, by increasing hemostatic or thrombolytic activity, a polynucleotide or polypeptide of the present invention could be used to treat blood coagulation disorders (e.g., afibrinogenemia, factor deficiencies), blood platelet disorders (e.g. thrombocytopenia), or wounds resulting from trauma, surgery, or other causes. Alternatively, a polynucleotide or polypeptide of the present invention that can decrease hemostatic or thrombolytic activity could be used to inhibit or dissolve clotting. These molecules could be important in the treatment of heart attacks (infarction), strokes, or scarring.

[0976] A polynucleotide or polypeptide of the present invention may also be useful in treating or detecting autoimmune disorders. Many autoimmune disorders result from inappropriate recognition of self as foreign material by immune cells. This inappropriate recognition results in an immune response leading to the destruction of the host tissue. Therefore, the administration of a polypeptide or polynucleotide of the present invention that inhibits an immune response, particularly the proliferation, differentiation, or chemotaxis of T-cells, may be an effective therapy in preventing autoimmune disorders.

[0977] Examples of autoimmune disorders that can be treated or detected by the present invention include, but are not limited to: Addison's Disease, hemolytic anemia, antiphospholipid syndrome, rheumatoid arthritis, dermatitis, allergic encephalomyelitis, glomerulonephritis, Goodpasture's Syndrome, Graves' Disease, Multiple Sclerosis, Myasthenia Gravis, Neuritis, Ophthalmia, Bullous Pemphigoid, Pemphigus, Polyendocrinopathies, Purpura, Reiter's Disease, Stiff-Man Syndrome, Autoimmune Thyroiditis, Systemic Lupus Erythematosus, Autoimmune Pulmonary Inflammation, Guillain-Barre Syndrome, insulin dependent diabetes mellitis, and autoimmune inflammatory eye disease.

[0978] Similarly, allergic reactions and conditions, such as asthma (particularly allergic asthma) or other respiratory problems, may also be treated by a polypeptide or polynucleotide of the present invention. Moreover, these molecules can be used to treat anaphylaxis, hypersensitivity to an antigenic molecule, or blood group incompatibility.

[0979] A polynucleotide or polypeptide of the present invention may also be used to treat and/or prevent organ rejection or graft-versus-host disease (GVHD). Organ rejection occurs by host immune cell destruction of the transplanted tissue through an immune response. Similarly, an immune response is also involved in GVHD, but, in this case, the foreign transplanted immune cells destroy the host tissues. The administration of a polypeptide or polynucleotide of the present invention that inhibits an immune response, particularly the proliferation, differentiation, or chemotaxis of T-cells, may be an effective therapy in preventing organ rejection or GVHD.

[0980] Similarly, a polypeptide or polynucleotide of the present invention may also be used to modulate inflammation. For example, the polypeptide or polynucleotide may inhibit the proliferation and differentiation of cells involved in an inflammatory response. These molecules can be used to treat inflammatory conditions, both chronic and acute conditions, including inflammation associated with infection (e.g., septic shock, sepsis, or systemic inflammatory response syndrome (SIRS)), ischemia-reperfusion injury, endotoxin lethality, arthritis, complement-mediated hyperacute rejection, nephritis, cytokine or chemokine induced lung injury, inflammatory bowel disease, Crohn's disease, or resulting from over production of cytokines (e.g., TNF or IL-1.)

[0981] Hyperproliferative Disorders

[0982] A polypeptide or polynucleotide can be used to treat or detect hyperproliferative disorders, including neoplasms. A polypeptide or polynucleotide of the present invention may inhibit the proliferation of the disorder through direct or indirect interactions. Alternatively, a polypeptide or polynucleotide of the present invention may proliferate other cells which can inhibit the hyperproliferative disorder.

[0983] For example, by increasing an immune response, particularly increasing antigenic qualities of the hyperproliferative disorder or by proliferating, differentiating, or mobilizing T-cells, hyperproliferaitive disorders can be treated. This immune response may be increased by either enhancing an existing immune response, or by initiating a new immune response. Alternatively, decreasing an immune response may also be a method of treating hyperproliferative disorders, such as a chemotherapeutic agent.

[0984] Examples of hyperproliferative disorders that can be treated or detected by a polynucleotide or polypeptide of the present invention include, but are not limited to neoplasms located in the: abdomen, bone, breast, digestive system, liver, pancreas, peritoneum, endocrine glands (adrenal, parathyroid, pituitary, testicles, ovary, thymus, thyroid), eye, head and neck, nervous (central and peripheral), lymphatic system, pelvic, skin, soft tissue, spleen, thoracic, and urogenital.

[0985] Similarly, other hyperproliferative disorders can also be treated or detected by a polynucleotide or polypeptide of the present invention. Examples of such hyperproliferative disorders include, but are not limited to:

[0986] hypergammaglobulinemia, lymphoproliferative disorders, paraproteinemias, purpura, sarcoidosis, Sezary Syndrome, Waldenstron's Macroglobulinemia, Gaucher's Disease, histiocytosis, and any other hyperproliferative disease, besides neoplasia, located in an organ system listed above.

[0987] Infectious Disease

[0988] A polypeptide or polynucleotide of the present invention can be used to treat or detect infectious agents. For example, by increasing the immune response, particularly increasing the proliferation and differentiation of B and/or T cells, infectious diseases may be treated. The immune response may be increased by either enhancing an existing immune response, or by initiating a new immune response. Alternatively, the polypeptide or polynucleotide of the present invention may also directly inhibit the infectious agent, without necessarily eliciting an inmmune response.

[0989] Viruses are one example of an infectious agent that can cause disease or symptoms that can be treated or detected by a polynucleotide or polypeptide of the present invention. Examples of viruses, include, but are not limited to the following DNA and RNA viral families: Arbovirus, Adenoviridae, Arenaviridae, Arterivirus, Birnaviridae, Bunyaviridae, Caliciviridae, Circoviridae, Coronaviridae, Flaviviridae, Hepadnaviridae (Hepatitis), Herpesviridae (such as, Cytomegalovirus, Herpes Simplex, Herpes Zoster), Mononegavirus (e.g., Paramyxoviridae, Morbillivirus, Rhabdoviridae), Orthomyxoviridae (e.g., Influenza), Papovaviridae, Parvoviridae, Picornaviridae, Poxviridae (such as Smallpox or Vaccinia), Reoviridae (e.g., Rotavirus), Retroviridae (HTLV-I, HTLV-II, Lentivirus), and Togaviridae (e.g., Rubivirus). Viruses falling within these families can cause a variety of diseases or symptoms, including, but not limited to: arthritis, bronchiollitis, encephalitis, eye infections (e.g., conjunctivitis, keratitis), chronic fatigue syndrome, hepatitis (A, B, C, E, Chronic Active, Delta), meningitis, opportunistic infections (e.g., AIDS), pneumonia, Burkitt's Lymphoma, chickenpox, hemorrhagic fever, Measles, Mumps, Parainfluenza, Rabies, the common cold, Polio, leukemia, Rubella, sexually transmitted diseases, skin diseases (e.g., Kaposi's, warts), and viremia. A polypeptide or polynucleotide of the present invention can be used to treat or detect any of these symptoms or diseases.

[0990] Similarly, bacterial or fungal agents that can cause disease or symptoms and that can be treated or detected by a polynucleotide or polypeptide of the present invention include, but not limited to, the following Gram-Negative and Gram-positive bacterial families and fungi: Actinomycetales (e.g., Corynebacterium, Mycobacterium, Norcardia), Aspergillosis, Bacillaceae (e.g., Anthrax, Clostridium), Bacteroidaceae, Blastomycosis, Bordetella, Borrelia, Brucellosis, Candidiasis, Campylobacter, Coccidioidomycosis, Cryptococcosis, Dermatocycoses, Enterobacteriaceae (Klebsiella, Salmonella, Serratia, Yersinia), Erysipelothrix, Helicobacter, Legionellosis, Leptospirosis, Listeria, Mycoplasmatales, Neisseriaceae (e.g., Acinetobacter, Gonorrhea, Menigococcal), Pasteurellacea Infections (e.g., Actinobacillus, Heamophilus, Pasteurella), Pseudomonas, Rickettsiaceae, Chlamydiaceae, Syphilis, and Staphylococcal. These bacterial or fungal families can cause the following diseases or symptoms, including, but not limited to: bacteremia, endocarditis, eye infections (conjunctivitis, tuberculosis, uveitis), gingivitis, opportunistic infections (e.g., AIDS related infections), paronychia, prosthesis-related infections, Reiter's Disease, respiratory tract infections, such as Whooping Cough or Empyema, sepsis, Lyme Disease, Cat-Scratch Disease, Dysentery, Paratyphoid Fever, food poisoning, Typhoid, pneumonia, Gonorrhea, meningitis, Chlamydia, Syphilis, Diphtheria, Leprosy, Paratuberculosis, Tuberculosis, Lupus, Botulism, gangrene, tetanus, impetigo, Rheumatic Fever, Scarlet Fever, sexually transmitted diseases, skin diseases (e.g., cellulitis, dermatocycoses), toxemia, urinary tract infections, wound infections. A polypeptide or polynucleotide of the present invention can be used to treat or detect any of these symptoms or diseases.

[0991] Moreover, parasitic agents causing disease or symptoms that can be treated or detected by a polynucleotide or polypeptide of the present invention include, but not limited to, the following families: Amebiasis, Babesiosis, Coccidiosis, Cryptosporidiosis, Dientamoebiasis, Dourine, Ectoparasitic, Giardiasis, Helminthiasis, Leishmaniasis, Theileriasis, Toxoplasmosis, Trypanosomiasis, and Trichomonas. These parasites can cause a variety of diseases or symptoms, including, but not limited to: Scabies, Trombiculiasis, eye infections, intestinal disease (e.g., dysentery, giardiasis), liver disease, lung disease, opportunistic infections (e.g., AIDS related), Malaria, pregnancy complications, and toxoplasmosis. A polypeptide or polynucleotide of the present invention can be used to treat or detect any of these symptoms or diseases.

[0992] Preferably, treatment using a polypeptide or polynucleotide of the present invention could either be by administering an effective amount of a polypeptide to the patient, or by removing cells from the patient, supplying the cells with a polynucleotide of the present invention, and returning the engineered cells to the patient (ex vivo therapy). Moreover, the polypeptide or polynucleotide of the present invention can be used as an antigen in a vaccine to raise an immune response against infectious disease.

[0993] Regeneration

[0994] A polynucleotide or polypeptide of the present invention can be used to differentiate, proliferate, and attract cells, leading to the regeneration of tissues. (See, Science 276:59-87 (1997).) The regeneration of tissues could be used to repair, replace. or protect tissue damaged by congenital defects, trauma (wounds, burns, incisions. or ulcers), age, disease (e.g. osteoporosis, osteocarthritis, periodontal disease, liver failure), surgery, including cosmetic plastic surgery, fibrosis, reperfusion injury, or systemic cytokine damage.

[0995] Tissues that could be regenerated using the present invention include organs (e.g., pancreas, liver, intestine, kidney, skin, endothelium), muscle (smooth, skeletal or cardiac), vasculature (including vascular and lymphatics), nervous, hematopoietic, and skeletal (bone, cartilage, tendon, and ligament) tissue. Preferably, regeneration occurs without or decreased scarring. Regeneration also may include angiogenesis.

[0996] Moreover, a polynucleotide or polypeptide of the present invention may increase regeneration of tissues difficult to heal. For example, increased tendon/ligament regeneration would quicken recovery time after damage. A polynucleotide or polypeptide of the present invention could also be used prophylactically in an effort to avoid damage. Specific diseases that could be treated include of tendinitis, carpal tunnel syndrome, and other tendon or ligament defects. A further example of tissue regeneration of non-healing wounds includes pressure ulcers, ulcers associated with vascular insufficiency, surgical, and traumatic wounds.

[0997] Similarly, nerve and brain tissue could also be regenerated by using a polynucleotide or polypeptide of the present invention to proliferate and differentiate nerve cells. Diseases that could be treated using this method include central and peripheral nervous system diseases, neuropathies, or mechanical and traumatic disorders (e.g., spinal cord disorders, head trauma, cerebrovascular disease, and stoke). Specifically, diseases associated with peripheral nerve injuries, peripheral neuropathy (e.g., resulting from chemotherapy or other medical therapies), localized neuropathies, and central nervous system diseases (e.(g., Alzheimer's disease, Parkinson's disease, Huntington's disease, amyotrophic lateral sclerosis, and Shy-Drager syndrome), could all be treated using the polynucleotide or polypeptide of the present invention.

[0998] Chemotaxis

[0999] A polynucleotide or polypeptide of the present invention may have chemotaxis activity. A chemotaxic molecule attracts or mobilizes cells (e.g., monocytes, fibroblasts, neutrophils, T-cells, mast cells, eosinophils, epithelial and/or endothelial cells) to a particular site in the body, such as inflammation, infection, or site of hyperproliferation. The mobilized cells can then fight off and/or heal the particular trauma or abnormality.

[1000] A polynucleotide or polypeptide of the present invention may increase chemotaxic activity of particular cells. These chemotactic molecules can then be used to treat inflammation, infection, hyperproliferative disorders, or any immune system disorder by increasing the number of cells targeted to a particular location in the body. For example, chemotaxic molecules can be used to treat wounds and other trauma to tissues by attracting immune cells to the injured location. Chemotactic molecules of the present invention can also attract fibroblasts, which can be used to treat wounds.

[1001] It is also contemplated that a polynucleotide or polypeptide of the present invention may inhibit chemotactic activity. These molecules could also be used to treat disorders. Thus, a polynucleotide or polypeptide of the present invention could be used as an inhibitor of chemotaxis.

[1002] Binding Activity

[1003] A polypeptide of the present invention may be used to screen for molecules that bind to the polypeptide or for molecules to which the polypeptide binds. The binding of the polypeptide and the molecule may activate (agonist), increase, inhibit (antagonist), or decrease activity of the polypeptide or the molecule bound. Examples of such molecules include antibodies, oligonucleotides, proteins (e.g., receptors),or small molecules.

[1004] Preferably, the molecule is closely related to the natural ligand of the polypeptide, e.g., a fragment of the ligand, or a natural substrate, a ligand, a structural or functional mimetic. (See, Coligan et al., Current Protocols in Immunology 1(2):Chapter 5 (1991).) Similarly, the molecule can be closely related to the natural receptor to which the polypeptide binds, or at least, a fragment of the receptor capable of being bound by the polypeptide (e.g., active site). In either case, the molecule can be rationally designed using known techniques.

[1005] Preferably, the screening for these molecules involves producing appropriate cells which express the polypeptide, either as a secreted protein or on the cell membrane. Preferred cells include cells from mammals, yeast, Drosophila, or E. coli. Cells expressing the polypeptide (or cell membrane containing the expressed polypeptide) are then preferably contacted with a test compound potentially containing the molecule to observe binding, stimulation, or inhibition of activity of either the polypeptide or the molecule.

[1006] The assay may simply test binding of a candidate compound to the polypeptide, wherein binding is detected by a label, or in an assay involving competition with a labeled competitor. Further, the assay may test whether the candidate compound results in a signal generated by binding to the polypeptide.

[1007] Alternatively, the assay can be carried out using cell-free preparations, polypeptide/molecule affixed to a solid support, chemical libraries, or natural product mixtures. The assay may also simply comprise the steps of mixing a candidate compound with a solution containing a polypeptide, measuring polypeptide/molecule activity or binding, and comparing the polypeptide/molecule activity or binding to a standard.

[1008] Preferably, an ELISA assay can measure polypeptide level or activity in a sample (e.g., biological sample) using a monoclonal or polyclonal antibody. The antibody can measure polypeptide level or activity by either binding, directly or indirectly, to the polypeptide or by competing with the polypeptide for a substrate.

[1009] All of these above assays can be used as diagnostic or prognostic markers. The molecules discovered using these assays can be used to treat disease or to bring about a particular result in a patient (e.g., blood vessel growth) by activating or inhibiting the polypeptide/molecule. Moreover, the assays can discover agents which may inhibit or enhance the production of the polypeptide from suitably manipulated cells or tissues.

[1010] Therefore, the invention includes a method of identifying compounds which bind to a polypeptide of the invention comprising the steps of: (a) incubating a candidate binding compound with a polypeptide of the invention; and (b) determining if binding has occurred. Moreover, the invention includes a method of identifying agonists/antagonists comprising the steps of: (a) incubating a candidate compound with a polypeptide of the invention, (b) assaying a biological activity , and (b) determining if a biological activity of the polypeptide has been altered.

[1011] Other Activities

[1012] A polypeptide or polynucleotide of the present invention may also increase or decrease the differentiation or proliferation of embryonic stem cells, besides, as discussed above, hematopoietic lineage.

[1013] A polypeptide or polynucleotide of the present invention may also be used to modulate mammalian characteristics, such as body height, weight, hair color, eye color, skin, percentage of adipose tissue, pigmentation, size, and shape (e.g., cosmetic surgery). Similarly, a polypeptide or polynucleotide of the present invention may be used to modulate mammalian metabolism affecting catabolism, anabolism, processing, utilization, and storage of energy.

[1014] A polypeptide or polynucleotide of the present invention may be used to change a mammal's mental state or physical state by influencing biorhythms, caricadic rhythms, depression (including depressive disorders), tendency for violence, tolerance for pain, reproductive capabilities (preferably by Activin or Inhibin-like activity), hormonal or endocrine levels, appetite, libido, memory, stress, or other cognitive qualities.

[1015] A polypeptide or polynucleotide of the present invention may also be used as a food additive or preservative, such as to increase or decrease storage capabilities, fat content, lipid, protein, carbohydrate, vitamins, minerals, cofactors or other nutritional components.

[1016] Other Preferred Embodiments

[1017] Other preferred embodiments of the claimed invention include an isolated nucleic acid molecule comprising a nucleotide sequence which is at least 95% identical to a sequence of at least about 50 contiguous nucleotides in the nucleotide sequence of SEQ ID NO:X wherein X is any integer as defined in Table 1.

[1018] Also preferred is a nucleic acid molecule wherein said sequence of contiguous nucleotides is included in the nucleotide sequence of SEQ ID NO:X in the range of positions beginning with the nucleotide at about the position of the 5′ Nucleotide of the Clone Sequence and ending with the nucleotide at about the position of the 3′ Nucleotide of the Clone Sequence as defined for SEQ ID NO:X in Table 1.

[1019] Also preferred is a nucleic acid molecule wherein said sequence of contiguous nucleotides is included in the nucleotide sequence of SEQ ID NO:X in the range of positions beginning with the nucleotide at about the position of the 5′ Nucleotide of the Start Codon and ending with the nucleotide at about the position of the 3′ Nucleotide of the Clone Sequence as defined for SEQ ID NO:X in Table 1.

[1020] Similarly preferred is a nucleic acid molecule wherein said sequence of contiguous nucleotides is included in the nucleotide sequence of SEQ ID NO:X in the range of positions beginning with the nucleotide at about the position of the 5′ Nucleotide of the First Amino Acid of the Signal Peptide and ending with the nucleotide at about the position of the 3′ Nucleotide of the Clone Sequence as defined for SEQ ID NO:X in Table 1.

[1021] Also preferred is an isolated nucleic acid molecule comprising a nucleotide sequence which is at least 95% identical to a sequence of at least about 150 contiguous nucleotides in the nucleotide sequence of SEQ BD NO:X.

[1022] Further preferred is an isolated nucleic acid molecule comprising a nucleotide sequence which is at least 95% identical to a sequence of at least about 500 contiguous nucleotides in the nucleotide sequence of SEQ ID NO:X.

[1023] A further preferred embodiment is a nucleic acid molecule comprising a nucleotide sequence which is at least 95% identical to the nucleotide sequence of SEQ ID NO:X beginning with the nucleotide at about the position of the 5′ Nucleotide of the First Amino Acid of the Signal Peptide and ending with the nucleotide at about the position of the 3′ Nucleotide of the Clone Sequence as defined for SEQ ID NO:X in Table 1.

[1024] A further preferred embodiment is an isolated nucleic acid molecule comprising a nucleotide sequence which is at least 95% identical to the complete nucleotide sequence of SEQ ID NO:X.

[1025] Also preferred is an isolated nucleic acid molecule which hybridizes under stringent hybridization conditions to a nucleic acid molecule, wherein said nucleic acid molecule which hybridizes does not hybridize under stringent hybridization conditions to a nucleic acid molecule having a nucleotide sequence consisting of only A residues or of only T residues.

[1026] Also preferred is a composition of matter comprising a DNA molecule which comprises a human cDNA clone identified by a cDNA Clone Identifier in Table 1, which DNA molecule is contained in the material deposited with the American Type Culture Collection and given the ATCC Deposit Number shown in Table 1 for said cDNA Clone Identifier.

[1027] Also preferred is an isolated nucleic acid molecule comprising a nucleotide sequence which is at least 95% identical to a sequence of at least 50 contiguous nucleotides in the nucleotide sequence of a human cDNA clone identified by a cDNA Clone Identifier in Table 1, which DNA molecule is contained in the deposit given the ATCC Deposit Number shown in Table 1.

[1028] Also preferred is an isolated nucleic acid molecule, wherein said sequence of at least 50 contiguous nucleotides is included in the nucleotide sequence of the complete open reading frame sequence encoded by said human cDNA clone.

[1029] Also preferred is an isolated nucleic acid molecule comprising a nucleotide sequence which is at least 95% identical to sequence of at least 150 contiguous nucleotides in the nucleotide sequence encoded by said human cDNA clone.

[1030] A further preferred embodiment is an isolated nucleic acid molecule comprising a nucleotide sequence which is at least 95% identical to sequence of at least 500 contiguous nucleotides in the nucleotide sequence encoded by said human cDNA clone.

[1031] A further preferred embodiment is an isolated nucleic acid molecule comprising a nucleotide sequence which is at least 95% identical to the complete nucleotide sequence encoded by said human cDNA clone.

[1032] A further preferred embodiment is a method for detecting in a biological sample a nucleic acid molecule comprising a nucleotide sequence which is at least 95% identical to a sequence of at least 50 contiguous nucleotides in a sequence selected from the group consisting of: a nucleotide sequence of SEQ ID NO:X wherein X is any integer as defined in Table 1; and a nucleotide sequence encoded by a human cDNA clone identified by a cDNA Clone Identifier in Table 1 and contained in the deposit with the ATCC Deposit Number shown for said cDNA clone in Table 1; which method comprises a step of comparing a nucleotide sequence of at least one nucleic acid molecule in said sample with a sequence selected from said group and determining whether the sequence of said nucleic acid molecule in said sample is at least 95% identical to said selected sequence.

[1033] Also preferred is the above method wherein said step of comparing sequences comprises determining the extent of nucleic acid hybridization between nucleic acid molecules in said sample and a nucleic acid molecule comprising said sequence selected from said group. Similarly, also preferred is the above method wherein said step of comparing sequences is performed by comparing the nucleotide sequence determined from a nucleic acid molecule in said sample with said sequence selected from said group. The nucleic acid molecules can comprise DNA molecules or RNA molecules.

[1034] A further preferred embodiment is a method for identifying the species, tissue or cell type of a biological sample which method comprises a step of detecting nucleic acid molecules in said sample, if any, comprising a nucleotide sequence that is at least 95% identical to a sequence of at least 50 contiguous nucleotides in a sequence selected from the group consisting of: a nucleotide sequence of SEQ ID NO:X wherein X is any integer as defined in Table 1; and a nucleotide sequence encoded by a human cDNA clone identified by a cDNA Clone Identifier in Table 1 and contained in the deposit with the ATCC Deposit Number shown for said cDNA clone in Table 1.

[1035] The method for identifying the species, tissue or cell type of a biological sample can comprise a step of detecting nucleic acid molecules comprising a nucleotide sequence in a panel of at least two nucleotide sequences, wherein at least one sequence in said panel is at least 95% identical to a sequence of at least 50 contiguous nucleotides in a sequence selected from said group.

[1036] Also preferred is a method for diagnosing in a subject a pathological condition associated with abnormal structure or expression of a gene encoding a secreted protein identified in Table 1, which method comprises a step of detecting in a biological sample obtained from said subject nucleic acid molecules, if any, comprising a nucleotide sequence that is at least 95% identical to a sequence of at least 50 contiguous nucleotides in a sequence selected from the group consisting of: a nucleotide sequence of SEQ ID NO:X wherein X is any integer as defined in Table 1; and a nucleotide sequence encoded by a human cDNA clone identified by a cDNA Clone Identifier in Table 1 and contained in the deposit with the ATCC Deposit Number shown for said cDNA clone in Table 1.

[1037] The method for diagnosing a pathological condition can comprise a step of detecting nucleic acid molecules comprising a nucleotide sequence in a panel of at least two nucleotide sequences, wherein at least one sequence in said panel is at least 95% identical to a sequence of at least 50 contiguous nucleotides in a sequence selected from said group.

[1038] Also preferred is a composition of matter comprising isolated nucleic acid molecules wherein the nucleotide sequences of said nucleic acid molecules comprise a panel of at least two nucleotide sequences, wherein at least one sequence in said panel is at least 95% identical to a sequence of at least 50 contiguous nucleotides in a sequence selected from the group consisting of: a nucleotide sequence of SEQ ID NO:X wherein X is any integer as defined in Table 1; and a nucleotide sequence encoded by a human cDNA clone identified by a cDNA Clone Identifier in Table 1 and contained in the deposit with the ATCC Deposit Number shown for said cDNA clone in Table 1. The nucleic acid molecules can comprise DNA molecules or RNA molecules.

[1039] Also preferred is an isolated polypeptide comprising an amino acid sequence at least 90% identical to a sequence of at least about 10 contiguous amino acids in the amino acid sequence of SEQ ID NO:Y wherein Y is any integer as defined in Table 1.

[1040] Also preferred is a polypeptide, wherein said sequence of contiguous amino acids is included in the amino acid sequence of SEQ ID NO:Y in the range of positions beginning with the residue at about the position to the First Amino Acid of the Secreted Portion and ending with the residue at about the Last Amino Acid of the Open Reading Frame as set forth for SEQ ID NO:Y in Table 1.

[1041] Also preferred is an isolated polypeptide comprising an amino acid sequence at least 95% identical to a sequence of at least about 30 contiguous amino acids in the amino acid sequence of SEQ ID NO:Y.

[1042] Further preferred is an isolated polypeptide comprising an amino acid sequence at least 95% identical to a sequence of at least about 100 contiguous amino acids in the amino acid sequence of SEQ ID NO:Y.

[1043] Further preferred is an isolated polypeptide comprising an amino acid sequence at least 95% identical to the complete amino acid sequence of SEQ ID NO:Y.

[1044] Further preferred is an isolated polypeptide comprising an amino acid sequence at least 90% identical to a sequence of at least about 10 contiguous amino acids in the complete amino acid sequence of a secreted protein encoded by a human cDNA clone identified by a cDNA Clone Identifier in Table 1 and contained in the deposit with the ATCC Deposit Number shown for said cDNA clone in Table 1.

[1045] Also preferred is a polypeptide wherein said sequence of contiguous amino acids is included in the amino acid sequence of a secreted portion of the secreted protein encoded by a human cDNA clone identified by a cDNA Clone Identifier in Table 1 and contained in the deposit with the ATCC Deposit Number shown for said cDNA clone in Table 1.

[1046] Also preferred is an isolated polypeptide comprising an amino acid sequence at least 95% identical to a sequence of at least about 30 contiguous amino acids in the amino acid sequence of the secreted portion of the protein encoded by a human cDNA clone identified by a cDNA Clone Identifier in Table 1 and contained in the deposit with the ATCC Deposit Number shown for said cDNA clone in Table 1.

[1047] Also preferred is an isolated polypeptide comprising an amino acid sequence at least 95% identical to a sequence of at least about 100 contiguous amino acids in the amino acid sequence of the secreted portion of the protein encoded by a human cDNA clone identified by a cDNA Clone Identifier in Table 1 and contained in the deposit with the ATCC Deposit Number shown for said cDNA clone in Table 1.

[1048] Also preferred is an isolated polypeptide comprising an amino acid sequence at least 95% identical to the amino acid sequence of the secreted portion of the protein encoded by a human cDNA clone identified by a cDNA Clone Identifier in Table 1 and contained in the deposit with the ATCC Deposit Number shown for said cDNA clone in Table 1.

[1049] Further preferred is an isolated antibody which binds specifically to a polypeptide comprising an amino acid sequence that is at least 90% identical to a sequence of at least 10 contiguous amino acids in a sequence selected from the group consisting of: an amino acid sequence of SEQ ID NO:Y wherein Y is any integer as defined in Table 1; and a complete amino acid sequence of a protein encoded by a human cDNA clone identified by a cDNA Clone Identifier in Table 1 and contained in the deposit with the ATCC Deposit Number shown for said cDNA clone in Table 1.

[1050] Further preferred is a method for detecting in a biological sample a polypeptide comprising an amino acid sequence which is at least 90% identical to a sequence of at least 10 contiguous amino acids in a sequence selected from the group consisting of: an amino acid sequence of SEQ ID NO:Y wherein Y is any integer as defined in Table 1; and a complete amino acid sequence of a protein encoded by a human cDNA clone identified by a cDNA Clone Identifier in Table 1 and contained in the deposit with the ATCC Deposit Number shown for said cDNA clone in Table 1; which method comprises a step of comparing an amino acid sequence of at least one polypeptide molecule in said sample with a sequence selected from said group and determining whether the sequence of said polypeptide molecule in said sample is at least 90% identical to said sequence of at least 10 contiguous amino acids.

[1051] Also preferred is the above method wherein said step of comparing an amino acid sequence of at least one polypeptide molecule in said sample with a sequence selected from said group comprises determining the extent of specific binding of polypeptides in said sample to an antibody which binds specifically to a polypeptide comprising an amino acid sequence that is at least 90% identical to a sequence of at least 10 contiguous amino acids in a sequence selected from the group consisting of: an amino acid sequence of SEQ ID NO:Y wherein Y is any integer as defined in Table 1; and a complete amino acid sequence of a protein encoded by a human cDNA clone identified by a cDNA Clone Identifier in Table 1 and contained in the deposit with the ATCC Deposit Number shown for said cDNA clone in Table 1.

[1052] Also preferred is the above method wherein said step of comparing sequences is performed by comparing the amino acid sequence determined from a polypeptide molecule in said sample with said sequence selected from said group.

[1053] Also preferred is a method for identifying the species, tissue or cell type of a biological sample which method comprises a step of detecting polypeptide molecules in said sample, if any, comprising an amino acid sequence that is at least 90% identical to a sequence of at least 10 contiguous amino acids in a sequence selected from the group consisting of: an amino acid sequence of SEQ ID NO:Y wherein Y is any integer as defined in Table 1; and a complete amino acid sequence of a secreted protein encoded by a human cDNA clone identified by a cDNA Clone Identifier in Table 1 and contained in the deposit with the ATCC Deposit Number shown for said cDNA clone in Table 1.

[1054] Also preferred is the above method for identifying the species, tissue or cell type of a biological sample, which method comprises a step of detecting polypeptide molecules comprising an amino acid sequence in a panel of at least two amino acid sequences, wherein at least one sequence in said panel is at least 90% identical to a sequence of at least 10 contiguous amino acids in a sequence selected from the above group.

[1055] Also preferred is a method for diagnosing in a subject a pathological condition associated with abnormal structure or expression of a gene encoding a secreted protein identified in Table 1, which method comprises a step of detecting in a biological sample obtained from said subject polypeptide molecules comprising an amino acid sequence in a panel of at least two amino acid sequences, wherein at least one sequence in said panel is at least 90% identical to a sequence of at least 10 contiguous amino acids in a sequence selected from the group consisting of: an amino acid sequence of SEQ ID NO:Y wherein Y is any integer as defined in Table 1; and a complete amino acid sequence of a secreted protein encoded by a human cDNA clone identified by a cDNA Clone Identifier in Table 1 and contained in the deposit with the ATCC Deposit Number shown for said cDNA clone in Table 1.

[1056] In any of these methods, the step of detecting said polypeptide molecules includes using an antibody.

[1057] Also preferred is an isolated nucleic acid molecule comprising a nucleotide sequence which is at least 95% identical to a nucleotide sequence encoding a polypeptide wherein said polypeptide comprises an amino acid sequence that is at least 90% identical to a sequence of at least 10 contiguous amino acids in a sequence selected from the group consisting of: an amino acid sequence of SEQ ID NO:Y wherein Y is any integer as defined in Table 1; and a complete amino acid sequence of a secreted protein encoded by a human cDNA clone identified by a cDNA Clone Identifier in Table 1 and contained in the deposit with the ATCC Deposit Number shown for said cDNA clone in Table 1.

[1058] Also preferred is an isolated nucleic acid molecule, wherein said nucleotide sequence encoding a polypeptide has been optimized for expression of said polypeptide in a prokaryotic host.

[1059] Also preferred is an isolated nucleic acid molecule, wherein said polypeptide comprises an amino acid sequence selected from the group consisting of: an amino acid sequence of SEQ ID NO:Y wherein Y is any integer as defined in Table 1; and a complete amino acid sequence of a secreted protein encoded by a human cDNA clone identified by a cDNA Clone Identifier in Table 1 and contained in the deposit with the ATCC Deposit Number shown for said cDNA clone in Table 1.

[1060] Further preferred is a method of making a recombinant vector comprising inserting any of the above isolated nucleic acid molecule into a vector. Also preferred is the recombinant vector produced by this method. Also preferred is a method of making a recombinant host cell comprising introducing the vector into a host cell, as well as the recombinant host cell produced by this method.

[1061] Also preferred is a method of making an isolated polypeptide comprising culturing this recombinant host cell under conditions such that said polypeptide is expressed and recovering said polypeptide. Also preferred is this method of making an isolated polypeptide, wherein said recombinant host cell is a eukaryotic cell and said polypeptide is a secreted portion of a human secreted protein comprising an amino acid sequence selected from the group consisting of: an amino acid sequence of SEQ ID NO:Y beginning with the residue at the position of the First Amino Acid of the Secreted Portion of SEQ ID NO:Y wherein Y is an integer set forth in Table 1 and said position of the First Amino Acid of the Secreted Portion of SEQ ID NO:Y is defined in Table 1; and an amino acid sequence of a secreted portion of a protein encoded by a human cDNA clone identified by a cDNA Clone Identifier in Table 1 and contained in the deposit with the ATCC Deposit Number shown for said cDNA clone in Table 1. The isolated polypeptide produced by this method is also preferred.

[1062] Also preferred is a method of treatment of an individual in need of an increased level of a secreted protein activity, which method comprises administering to such an individual a pharmaceutical composition comprising an amount of an isolated polypeptide, polynucleotide, or antibody of the claimed invention effective to increase the level of said protein activity in said individual.

[1063] Having generally described the invention, the same will be more readily understood by reference to the following examples, which are provided by way of illustration and are not intended as limiting.

### EXAMPLES

### Example 1

[1064] Isolation of a Selected cDNA Clone From the Deposited Sample

[1065] Each cDNA clone in a cited ATCC deposit is contained in a plasmid vector. Table 1 identifies the vectors used to construct the cDNA library from which each clone was isolated. In many cases, the vector used to construct the library is a phage vector from which a plasmid has been excised. The table immediately below correlates the related plasmid for each phage vector used in constructing the cDNA library. For example, where a particular clone is identified in Table 1 as being isolated in the vector “Lambda Zap,” the corresponding deposited clone is in “pBluescript.”

| Vector Used to | |
|---|---|
| Construct Library Plasmid | Corresponding Deposited |
| Lambda Zap | pBluescript (pBS) |
| Uni-Zap XR | pBluescript (pBS) |
| Zap Express | pBK |
| lafmid BA | plafmid BA |
| pSport1 | pSport1 |
| pCMVSport 2.0 | pCMVSport 2.0 |
| pCMVSport 3.0 | pCMVSport 3.0 |
| pCR ® 2.1 | pCR ® 2.1 |

[1066] Vectors Lambda Zap (U.S. Pat. Nos. 5,128,256 and 5,286,636), Uni-Zap XR (U.S. Pat. Nos. 5,128, 256 and 5,286,636), Zap Express (U.S. Pat. Nos. 5,128,256 and 5,286,636), pBluescript (pBS) (Short, J. M. et al., Nucleic Acids Res. 16:7583-7600 (1988); Alting-Mees, M. A. and Short, J. M., Nucleic Acids Res. 17:9494 (1989)) and pBK (Alting-Mees, M. A. et al., Strategies 5:58-61 (1992)) are commercially available from Stratagene Cloning Systems, Inc., 11011 N. Torrey Pines Road, La Jolla, Calif., 92037. pBS contains an ampicillin resistance gene and pBK contains a neomycin resistance gene. Both can be transformed into E. coli strain XL-1 Blue, also available from Stratagene. pBS comes in 4 forms SK+, SK−, KS+ and KS. The S and K refers to the orientation of the polylinker to the T7 and T3 primer sequences which flank the polylinker region (“S” is for SacI and “K” is for KpnI which are the first sites on each respective end of the linker). “+” or “−” refer to the orientation of the f1 origin of replication (“ori”), such that in one orientation, single stranded rescue initiated from the f1 ori generates sense strand DNA and in the other, antisense.

[1067] Vectors pSport1, pCMVSport 2.0 and pCMVSport 3.0, were obtained from Life Technologies, Inc., P. O. Box 6009, Gaithersburg, Md. 20897. All Sport vectors contain an ampicillin resistance gene and may be transformed into E. coli strain DH10B, also available from Life Technologies. (See, for instance, Gruber, C. E., et al., Focus 15:59 (1993).) Vector lafmid BA (Bento Soares, Columbia University, N.Y.) contains an ampicillin resistance gene and can be transformed into E. coli strain XL-1 Blue. Vector pCR®2.1, which is available from Invitrogen, 1600 Faraday Avenue, Carlsbad, Calif. 92008, contains an ampicillin resistance gene and may be transformed into E. coli strain DH10B, available from Life Technologies. (See, for instance, Clark, J. M., Nuc. Acids Res. 16:9677-9686 (1988) and Mead, D. et al., Bio/Technology 9: (1991).) Preferably, a polynucleotide of the present invention does not comprise the phage vector sequences identified for the particular clone in Table 1, as well as the corresponding plasmid vector sequences designated above.

[1068] The deposited material in the sample assigned the ATCC Deposit Number cited in Table 1 for any given cDNA clone also may contain one or more additional plasmids, each comprising a cDNA clone different from that given clone. Thus, deposits sharing the same ATCC Deposit Number contain at least a plasmid for each cDNA clone identified in Table 1. Typically, each ATCC deposit sample cited in Table 1 comprises a mixture of approximately equal amounts (by weight) of about 50 plasmid DNAs, each containing a different cDNA clone; but such a deposit sample may include plasmids for more or less than 50 cDNA clones, up to about 500 cDNA clones.

[1069] Two approaches can be used to isolate a particular clone from the deposited sample of plasmid DNAs cited for that clone in Table 1. First, a plasmid is directly isolated by screening the clones using a polynucleotide probe corresponding to SEQ ID NO:X.

[1070] Particularly, a specific polynucleotide with 30-40 nucleotides is synthesized using an Applied Biosystems DNA synthesizer according to the sequence reported. The oligonucleotide is labeled, for instance, with ³²P-γ-ATP using T4 polynucleotide kinase and purified according to routine methods. (E.g., Maniatis et al., Molecular Cloning: A Laboratory Manual, Cold Spring Harbor Press, Cold Spring, N.Y. (1982).) The plasmid mixture is transformed into a suitable host, as indicated above (such as XL-1 Blue (Stratagene)) using techniques known to those of skill in the art, such as those provided by the vector supplier or in related publications or patents cited above. The transformants are plated on 1.5% agar plates (containing the appropriate selection agent, e.g., ampicillin) to a density of about 150 transformants (colonies) per plate. These plates are screened using Nylon membranes according to routine methods for bacterial colony screening (e.g.. Sambrook et al., Molecular Cloning: A Laboratory Manual, 2nd Edit., (1989), Cold Spring Harbor Laboratory Press, pages 1.93 to 1.104), or other techniques known to those of skill in the art.

[1071] Alternatively, two primers of 17-20 nucleotides derived from both ends of the SEQ ID NO:X (i.e., within the region of SEQ ID NO:X bounded by the 5′ NT and the 3′ NT of the clone defined in Table 1) are synthesized and used to amplify the desired cDNA using the deposited cDNA plasmid as a template. The polymerase chain reaction is carried out under routine conditions, for instance, in 25 μl of reaction mixture with 0.5 ug of the above cDNA template. A convenient reaction mixture is 1.5-5 mM MgCl₂, 0.01% (w/v) gelatin, 20 μM each of dATP, dCTP, dGTP, dTTP, 25 pmol of each primer and 0.25 Unit of Taq polymerase. Thirty five cycles of PCR (denaturation at 94° C. for 1 min; annealing at 55° C. for 1 min; elongation at 72° C. for 1 min) are performed with a Perkin-Elmer Cetus automated thermal cycler. The amplified product is analyzed by agarose gel electrophoresis and the DNA band with expected molecular weight is excised and purified. The PCR product is verified to be the selected sequence by subcloning and sequencing the DNA product.

[1072] Several methods are available for the identification of the 5′ or 3′ non-coding portions of a gene which may not be present in the deposited clone. These methods include but are not limited to, filter probing, clone enrichment using specific probes, and protocols similar or identical to 5′ and 3′ “RACE” protocols which are well known in the art. For instance, a method similar to 5′ RACE is available for generating the missing 5′ end of a desired full-length transcript. (Fromont-Racine et al., Nucleic Acids Res. 21(7):1683-1684 (1993).)

[1073] Briefly, a specific RNA oligonucleotide is ligated to the 5′ ends of a population of RNA presumably containing full-length gene RNA transcripts. A primer set containing a primer specific to the ligated RNA oligonucleotide and a primer specific to a known sequence of the gene of interest is used to PCR amplify the 5′ portion of the desired full-length gene. This amplified product may then be sequenced and used to generate the full length gene.

[1074] This above method starts with total RNA isolated from the desired source, although poly-A+ RNA can be used. The RNA preparation can then be treated with phosphatase if necessary to eliminate 5′ phosphate groups on degraded or damaged RNA which may interfere with the later RNA ligase step. The phosphatase should then be inactivated and the RNA treated with tobacco acid pyrophosphatase in order to remove the cap structure present at the 5′ ends of messenger RNAs. This reaction leaves a 5′ phosphate group at the 5′ end of the cap cleaved RNA which can then be ligated to an RNA oligonucleotide using T4 RNA ligase.

[1075] This modified RNA preparation is used as a template for first strand cDNA synthesis using a gene specific oligonucleotide. The first strand synthesis reaction is used as a template for PCR amplification of the desired 5′ end using a primer specific to the ligated RNA oligonucleotide and a primer specific to the known sequence of the gene of interest. The resultant product is then sequenced and analyzed to confirm that the 5′ end sequence belongs to the desired gene.

### Example 2

[1076] Isolation of Genomic Clones Corresponding to a Polynucleotide

[1077] A human genomic P1 library (Genomic Systems, Inc.) is screened by PCR using primers selected for the cDNA sequence corresponding to SEQ ID NO:X., according to the method described in Example 1. (See also, Sambrook.)

### Example 3

[1078] Tissue Distribution of Polypeptide

[1079] Tissue distribution of mRNA expression of polynucleotides of the present invention is determined using protocols for Northern blot analysis, described by, among others, Sambrook et al. For example, a cDNA probe produced by the method described in Example 1 is labeled with P³² using the rediprime™ DNA labeling system (Amersham Life Science), according to manufacturer's instructions. After labeling, the probe is purified using CHROMA SPIN-100™ column (Clontech Laboratories, Inc.), according to manufacturer's protocol number PT1200-1. The purified labeled probe is then used to examine various human tissues for mRNA expression.

[1080] Multiple Tissue Northern (MTN) blots containing various human tissues (H) or human immune system tissues (IM) (Clontech) are examined with the labeled probe using ExpressHyb™ hybridization solution (Clontech) according to manufacturer's protocol number PT1190-1. Following hybridization and washing, the blots are mounted and exposed to film at −70° C. overnight, and the films developed according to standard procedures.

### Example 4

[1081] Chromosomal Mapping of the Polynucleotides

[1082] An oligonucleotide primer set is designed according to the sequence at the 5′ end of SEQ ID NO:X. This primer preferably spans about 100 nucleotides. This primer set is then used in a polymerase chain reaction under the following set of conditions : 30 seconds, 95° C.; 1 minute, 56° C.; 1 minute, 70° C. This cycle is repeated 32 times followed by one 5 minute cycle at 70° C. Human, mouse, and hamster DNA is used as template in addition to a somatic cell hybrid panel containing individual chromosomes or chromosome fragments (Bios, Inc). The reactions is analyzed on either 8% polyacrylamide gels or 3.5% agarose gels. Chromosome mapping is determined by the presence of an approximately 100 bp PCR fragment in the particular somatic cell hybrid.

### Example 5

[1083] Bacterial Expression of a Polypeptide

[1084] A polynucleotide encoding a polypeptide of the present invention is amplified using PCR oligonucleotide primers corresponding to the 5′ and 3′ ends of the DNA sequence, as outlined in Example 1, to synthesize insertion fragments. The primers used to amplify the cDNA insert should preferably contain restriction sites, such as BamHI and XbaI, at the 5′ end of the primers in order to clone the amplified product into the expression vector. For example, BamHI and XbaI correspond to the restriction enzyme sites on the bacterial expression vector pQE-9. (Qiagen, Inc., Chatsworth, Calif.). This plasmid vector encodes antibiotic resistance (Amp^{r}), a bacterial origin of replication (ori), an IPTG-regulatable promoter/operator (P/O), a ribosome binding site (RBS), a 6-histidine tag (6-His), and restriction enzyme cloning sites.

[1085] The pQE-9 vector is digested with BamHI and XbaI and the amplified fragment is ligated into the pQE-9 vector maintaining the reading frame initiated at the bacterial RBS. The ligation mixture is then used to transform the E. coli strain M15/rep4 (Qiagen, Inc.) which contains multiple copies of the plasmid pREP4, which expresses the lacI repressor and also confers kanamycin resistance (Kan^{r}). Transformants are identified by their ability to grow on LB plates and ampicillin/kanamycin resistant colonies are selected. Plasmid DNA is isolated and confirmed by restriction analysis.

[1086] Clones containing the desired constructs are grown overnight (O/N) in liquid culture in LB media supplemented with both Amp (100 ug/ml) and Kan (25 ug/ml). The O/N culture is used to inoculate a large culture at a ratio of 1:100 to 1:250. The cells are grown to an optical density 600 (O.D.⁶⁰⁰) of between 0.4 and 0.6. IPTG (Isopropyl-B-D-thiogalacto pyranoside) is then added to a final concentration of 1 mM. IPTG induces by inactivating the lacI repressor, clearing the P/O leading to increased gene expression.

[1087] Cells are grown for an extra 3 to 4 hours. Cells are then harvested by centrifugation (20 mins at 6000×g). The cell pellet is solubilized in the chaotropic agent 6 Molar Guanidine HCl by stirring for 3-4 hours at 4° C. The cell debris is removed by centrifugation, and the supernatant containing the polypeptide is loaded onto a nickel-nitrilo-tri-acetic acid (“Ni-NTA”) affinity resin column (available from QIAGEN, Inc., supra). Proteins with a 6×His tag bind to the Ni-NTA resin with high affinity and can be purified in a simple one-step procedure (for details see: The QIAexpressionist (1995) QIAGEN, Inc., supra).

[1088] Briefly, the supernatant is loaded onto the column in 6 M guanidine-HCl, pH 8, the column is first washed with 10 volumes of 6 M guanidine-HCl, pH 8, then washed with 10 volumes of 6 M guanidine-HCl pH 6, and finally the polypeptide is eluted with 6 M guanidine-HCl, pH 5.

[1089] The purified protein is then renatured by dialyzing it against phosphate-buffered saline (PBS) or 50 mM Na-acetate, pH 6 buffer plus 200 mM NaCl. Alternatively, the protein can be successfully refolded while immobilized on the Ni-NTA column. The recommended conditions are as follows: renature using a linear 6M-1M urea gradient in 500 mM NaCl, 20% glycerol, 20 mM Tris/HCl pH 7.4, containing protease inhibitors. The renaturation should be performed over a period of 1.5 hours or more. After renaturation the proteins are eluted by the addition of 250 mM immidazole Immidazole is removed by a final dialyzing step against PBS or 50 mM sodium acetate pH 6 buffer plus 200 mM NaCl. The purified protein is stored at 4° C. or frozen at −80° C.

[1090] In addition to the above expression vector, the present invention further includes an expression vector comprising phage operator and promoter elements operatively linked to a polynucleotide of the present invention, called pHE4a. (ATCC Accession Number 209645, deposited on Feb. 25, 1998.) This vector contains: 1) a neomycinphosphotransferase gene as a selection marker, 2) an E. coli origin of replication, 3) a T5 phage promoter sequence, 4) two lac operator sequences, 5) a Shine-Delgarno sequence, and 6) the lactose operon repressor gene (lacIq). The origin of replication (oriC) is derived from pUC19 (LTI, Gaithersburg, Md.). The promoter sequence and operator sequences are made synthetically.

[1091] DNA can be inserted into the pHEa by restricting the vector with NdeI and XbaI, BamHI, XhoI, or Asp718, running the restricted product on a gel, and isolating the larger fragment (the stuffer fragment should be about 310 base pairs). The DNA insert is generated according to the PCR protocol described in Example 1, using PCR primers having restriction sites for NdeI (5′ primer) and XbaI, BamHI, XhoI, or Asp718 (3′ primer). The PCR insert is gel purified and restricted with compatible enzymes. The insert and vector are ligated according to standard protocols.

[1092] The engineered vector could easily be substituted in the above protocol to express protein in a bacterial system.

### Example 6

[1093] Purification of a Polypeptide from an Inclusion Body

[1094] The following alternative method can be used to purify a polypeptide expressed in E coli when it is present in the form of inclusion bodies. Unless otherwise specified, all of the following steps are conducted at 4-10° C.

[1095] Upon completion of the production phase of the E. coli fermentation, the cell culture is cooled to 4-10° C. and the cells harvested by continuous centrifugation at 15,000 rpm (Heraeus Sepatech). On the basis of the expected yield of protein per unit weight of cell paste and the amount of purified protein required, an appropriate amount of cell paste, by weight, is suspended in a buffer solution containing 100 mM Tris, 50 mM EDTA, pH 7.4. The cells are dispersed to a homogeneous suspension using a high shear mixer.

[1096] The cells are then lysed by passing the solution through a microfluidizer (Microfuidics, Corp. or APV Gaulin, Inc.) twice at 4000-6000 psi. The homogenate is then mixed with NaCl solution to a final concentration of 0.5 M NaCl, followed by centrifugation at 7000×g for 15 min. The resultant pellet is washed again using 0.5M NaCl, 100 mM Tris, 50 mM EDTA, pH 7.4.

[1097] The resulting washed inclusion bodies are solubilized with 1.5 M guanidine hydrochloride (GuHCl) for 2-4 hours. After 7000×g centrifugation for 15 min., the pellet is discarded and the polypeptide containing supernatant is incubated at 4° C. overnight to allow further GuHCl extraction.

[1098] Following high speed centrifugation (30,000×g) to remove insoluble particles, the GuHCl solubilized protein is refolded by quickly mixing the GuHCl extract with 20 volumes of buffer containing 50 mM sodium, pH 4.5, 150 mM NaCl, 2 mM EDTA by vigorous stirring. The refolded diluted protein solution is kept at 4° C. without mixing for 12 hours prior to further purification steps.

[1099] To clarify the refolded polypeptide solution, a previously prepared tangential filtration unit equipped with 0.16 μm membrane filter with appropriate surface area (e.g., Filtron), equilibrated with 40 mM sodium acetate, pH 6.0 is employed. The filtered sample is loaded onto a cation exchange resin (e.g., Poros HS-50, Perseptive Biosystems). The column is washed with 40 mM sodium acetate, pH 6.0 and eluted with 250 mM, 500 mM, 1000 mM, and 1500 mM NaCl in the same buffer, in a stepwise manner. The absorbance at 280 nm of the effluent is continuously monitored. Fractions are collected and further analyzed by SDS-PAGE.

[1100] Fractions containing the polypeptide are then pooled and mixed with 4 volumes of water. The diluted sample is then loaded onto a previously prepared set of tandem columns of strong anion (Poros HQ-50, Perseptive Biosystems) and weak anion (Poros CM-20, Perseptive Biosystems) exchange resins. The columns are equilibrated with 40 mM sodium acetate, pH 6.0. Both columns are washed with 40 mM sodium acetate, pH 6.0, 200 mM NaCl. The CM-20 column is then eluted using a 10 column volume linear gradient ranging from 0.2 M NaCl, 50 mM sodium acetate, pH 6.0 to 1.0 M NaCl, 50 mM sodium acetate, pH 6.5. Fractions are collected under constant A₂₈₀ monitoring of the effluent. Fractions containing the polypeptide (determined, for instance, by 16% SDS-PAGE) are then pooled.

[1101] The resultant polypeptide should exhibit greater than 95% purity after the above refolding and purification steps. No major contaminant bands should be observed from Commassie blue stained 16% SDS-PAGE gel when 5 μg of purified protein is loaded. The purified protein can also be tested for endotoxin/LPS contamination, and typically the LPS content is less than 0.1 ng/ml according to LAL assays.

### Example 7

[1102] Cloning and Expression of a Polypeptide in a Baculovirus Expression System

[1103] In this example, the plasmid shuttle vector pA2 is used to insert a polynucleotide into a baculovirus to express a polypeptide. This expression vector contains the strong polyhedrin promoter of the Autographa californica nuclear polyhedrosis virus (AcMNPV) followed by convenient restriction sites such as BamHI, Xba I and Asp718. The polyadenylation site of the simian virus 40 (“SV40”) is used for efficient polyadenylation. For easy selection of recombinant virus, the plasmid contains the beta-galactosidase gene from E. coli under control of a weak Drosophila promoter in the same orientation, followed by the polyadenylation signal of the polyhedrin gene. The inserted genes are flanked on both sides by viral sequences for cell-mediated homologous recombination with wild-type viral DNA to generate a viable virus that express the cloned polynucleotide.

[1104] Many other baculovirus vectors can be used in place of the vector above, such as pAc373, pVL941, and pAcIM1, as one skilled in the art would readily appreciate, as long as the construct provides appropriately located signals for transcription, translation, secretion and the like, including a signal peptide and an in-frame AUG as required. Such vectors are described, for instance, in Luckow et al., Virology 170:31-39 (1989).

[1105] Specifically, the cDNA sequence contained in the deposited clone, including the AUG initiation codon and the naturally associated leader sequence identified in Table 1, is amplified using the PCR protocol described in Example 1. If the naturally occurring signal sequence is used to produce the secreted protein, the pA2 vector does not need a second signal peptide. Alternatively, the vector can be modified (pA2 GP) to include a baculovirus leader sequence, using the standard methods described in Summers et al., “A Manual of Methods for Baculovirus Vectors and Insect Cell Culture Procedures,” Texas Agricultural Experimental Station Bulletin No. 1555 (1987).

[1106] The amplified fragment is isolated from a 1% agarose gel using a commercially available kit (“Geneclean,” BIO 101 Inc., La Jolla, Calif.). The fragment then is digested with appropriate restriction enzymes and again purified on a 1% agarose gel.

[1107] The plasmid is digested with the corresponding restriction enzymes and optionally, can be dephosphorylated using calf intestinal phosphatase, using routine procedures known in the art. The DNA is then isolated from a 1% agarose gel using a commercially available kit (“Geneclean” BIO 101 Inc., La Jolla, Calif.).

[1108] The fragment and the dephosphorylated plasmid are ligated together with T4 DNA ligase. E. coli HB101 or other suitable E. coli hosts such as XL-1 Blue (Stratagene Cloning Systems, La Jolla, Calif.) cells are transformed with the ligation mixture and spread on culture plates. Bacteria containing the plasmid are identified by digesting DNA from individual colonies and analyzing the digestion product by gel electrophoresis. The sequence of the cloned fragment is confirmed by DNA sequencing.

[1109] Five μg of a plasmid containing the polynucleotide is co-transfected with 1.0 μg of a commercially available linearized baculovirus DNA (“BaculoGold™ baculovirus DNA”, Pharmingen, San Diego, Calif.), using the lipofection method described by Felgner et al., Proc. Natl. Acad. Sci. USA 84:7413-7417 (1987). One μg of BaculoGold™ virus DNA and 5 μg of the plasmid are mixed in a sterile well of a microtiter plate containing 50 μl of serum-free Grace's medium (Life Technologies Inc., Gaithersburg, Md.). Afterwards, 10 μl Lipofectin plus 90 μl Grace's medium are added, mixed and incubated for 15 minutes at room temperature. Then the transfection mixture is added drop-wise to Sf9 insect cells (ATCC CRL 1711) seeded in a 35 mm tissue culture plate with 1 ml Grace's medium without serum. The plate is then incubated for 5 hours at 27° C. The transfection solution is then removed from the plate and 1 ml of Grace's insect medium supplemented with 10% fetal calf serum is added. Cultivation is then continued at 27° C. for four days.

[1110] After four days the supernatant is collected and a plaque assay is performed, as described by Summers and Smith, supra. An agarose gel with “Blue Gal” (Life Technologies Inc., Gaithersburg) is used to allow easy identification and isolation of gal-expressing clones, which produce blue-stained plaques. (A detailed description of a “plaque assay” of this type can also be found in the user's guide for insect cell culture and baculovirology distributed by Life Technologies Inc., Gaithersburg, page 9-10.) After appropriate incubation, blue stained plaques are picked with the tip of a micropipettor (e.g., Eppendorf). The agar containing the recombinant viruses is then resuspended in a microcentrifuge tube containing 200 μl of Grace's medium and the suspension containing the recombinant baculovirus is used to infect Sf9 cells seeded in 35 mm dishes. Four days later the supernatants of these culture dishes are harvested and then they are stored at 4° C.

[1111] To verify the expression of the polypeptide, Sf9 cells are grown in Grace's medium supplemented with 10% heat-inactivated FBS. The cells are infected with the recombinant baculovirus containing the polynucleotide at a multiplicity of infection (“MOI”) of about 2. If radiolabeled proteins are desired, 6 hours later the medium is removed and is replaced with SF900 II medium minus methionine and cysteine (available from Life Technologies Inc., Rockville, Md.). After 42 hours, 5 μCi of ³⁵S-methionine and 5 μCi ³⁵S-cysteine (available from Amersham) are added. The cells are further incubated for 16 hours and then are harvested by centrifugation. The proteins in the supernatant as well as the intracellular proteins are analyzed by SDS-PAGE followed by autoradiography (if radiolabeled).

[1112] Microsequencing of the amino acid sequence of the amino terminus of purified protein may be used to determine the amino terminal sequence of the produced protein.

### Example 8

[1113] Expression of a Polypeptide in Mammalian Cells

[1114] The polypeptide of the present invention can be expressed in a mammalian cell. A typical mammalian expression vector contains a promoter element, which mediates the initiation of transcription of mRNA, a protein coding sequence, and signals required for the termination of transcription and polyadenylation of the transcript. Additional elements include enhancers, Kozak sequences and intervening sequences flanked by donor and acceptor sites for RNA splicing. Highly efficient transcription is achieved with the early and late promoters from SV40, the long terminal repeats (LTRs) from Retroviruses, e.g., RSV, HTLVI, HIVI and the early promoter of the cytomegalovirus (CMV). However, cellular elements can also be used (e.g., the human actin promoter).

[1115] Suitable expression vectors for use in practicing the present invention include, for example, vectors such as pSVL and pMSG (Pharmacia, Uppsala, Sweden), pRSVcat (ATCC 37152), pSV2dhfr (ATCC 37146), pBC12MI (ATCC 67109), pCMVSport 2.0, and pCMVSport 3.0. Mammalian host cells that could be used include, human Hela, 293, H9 and Jurkat cells, mouse NIH3T3 and C127 cells, Cos 1, Cos 7 and CV1, quail QC1-3 cells, mouse L cells and Chinese hamster ovary (CHO) cells.

[1116] Alternatively, the polypeptide can be expressed in stable cell lines containing the polynucleotide integrated into a chromosome. The co-transfection with a selectable marker such as dhfr, gpt, neomycin, hygromycin allows the identification and isolation of the transfected cells.

[1117] The transfected gene can also be amplified to express large amounts of the encoded protein. The DHFR (dihydrofolate reductase) marker is useful in developing cell lines that carry several hundred or even several thousand copies of the gene of interest. (See, e.g., Alt, F. W., et al., J. Biol. Chem. 253:1357-1370 (1978); Hamlin, J. L. and Ma, C., Biochem. et Biophys. Acta, 1097:107-143 (1990); Page, M. J. and Sydenham, M. A., Biotechnology 9:64-68 (1991).) Another useful selection marker is the enzyme glutamine synthase (GS) (Murphy et al., Biochem J. 227:277-279 (1991); Bebbington et al., Bio/Technology 10:169-175 (1992). Using these markers, the mammalian cells are grown in selective medium and the cells with the highest resistance are selected. These cell lines contain the amplified gene(s) integrated into a chromosome. Chinese hamster ovary (CHO) and NSO cells are often used for the production of proteins.

[1118] Derivatives of the plasmid pSV2-dhfr (ATCC Accession No. 37146), the expression vectors pC4 (ATCC Accession No. 209646) and pC6 (ATCC Accession No.209647) contain the strong promoter (LTR) of the Rous Sarcoma Virus (Cullen et al., Molecular and Cellular Biology, 438-447 (March, 1985)) plus a fragment of the CMV-enhancer (Boshart et al., Cell 41:521-530 (1985).) Multiple cloning sites, e.g., with the restriction enzyme cleavage sites BamHI, XbaI and Asp718, facilitate the cloning of the gene of interest. The vectors also contain the 3′ intron, the polyadenylation and termination signal of the rat preproinsulin gene, and the mouse DHFR gene under control of the SV40 early promoter.

[1119] Specifically, the plasmid pC6, for example,. is digested with appropriate restriction enzymes and then dephosphorylated using calf intestinal phosphates by procedures known in the art. The vector is then isolated from a 1% agarose gel.

[1120] A polynucleotide of the present invention is amplified according to the protocol outlined in Example 1. If the naturally occurring signal sequence is used to produce the secreted protein, the vector does not need a second signal peptide. Alternatively, if the naturally occurring signal sequence is not used, the vector can be modified to include a heterologous signal sequence. (See, e.g., WO 96/34891.)

[1121] The amplified fragment is isolated from a 1% agarose gel using a commercially available kit (“Geneclean,” BIO 101 Inc., La Jolla, Calif.). The fragment then is digested with appropriate restriction enzymes and again purified on a 1% agarose gel.

[1122] The amplified fragment is then digested with the same restriction enzyme and purified on a 1% agarose gel. The isolated fragment and the dephosphorylated vector are then ligated with T4 DNA ligase. E. Coli HB101 or XL-1 Blue cells are then transformed and bacteria are identified that contain the fragment inserted into plasmid pC6 using, for instance, restriction enzyme analysis.

[1123] Chinese hamster ovary cells lacking an active DHFR gene is used for transfection. Five μg of the expression plasmid pC6 is cotransfected with 0.5 μg of the plasmid pSVneo using lipofectin (Felgner et al., supra). The plasmid pSV2-neo contains a dominant selectable marker, the neo gene from Tn5 encoding an enzyme that confers resistance to a group of antibiotics including G418. The cells are seeded in alpha minus MEM supplemented with 1 mg/ml G418. After 2 days, the cells are trypsinized and seeded in hybridoma cloning plates (Greiner, Germany) in alpha minus MEM supplemented with 10, 25, or 50 ng/ml of metothrexate plus 1 mg/ml G418. After about 10-14 days single clones are trypsinized and then seeded in 6-well petri dishes or 10 ml flasks using different concentrations of methotrexate (50 nM, 100 nM, 200 nM, 400 nM, 800 nM). Clones growing at the highest concentrations of methotrexate are then transferred to new 6-well plates containing even higher concentrations of methotrexate (1 μM, 2 μM, 5 μM, 10 mM, 20 mM). The same procedure is repeated until clones are obtained which grow at a concentration of 100-200 μM. Expression of the desired gene product is analyzed, for instance, by SDS-PAGE and Western blot or by reversed phase HPLC analysis.

### Example 9

[1124] Protein Fusions

[1125] The polypeptides of the present invention are preferably fused to other proteins. These fusion proteins can be used for a variety of applications. For example, fusion of the present polypeptides to His-tag, HA-tag, protein A, IgG domains, and maltose binding protein facilitates purification. (See Example 5; see also EP A 394,827; Traunecker, et al., Nature 331:84-86 (1988).) Similarly, fusion to IgG-1, IgG-3, and albumin increases the halflife time in vivo. Nuclear localization signals fused to the polypeptides of the present invention can target the protein to a specific subcellular localization, while covalent heterodimer or homodimers can increase or decrease the activity of a fusion protein. Fusion proteins can also create chimeric molecules having more than one function. Finally, fusion proteins can increase solubility and/or stability of the fused protein compared to the non-fused protein. All of the types of fusion proteins described above can be made by modifying the following protocol, which outlines the fusion of a polypeptide to an IgG molecule, or the protocol described in Example 5.

[1126] Briefly, the human Fc portion of the IgG molecule can be PCR amplified, using primers that span the 5′ and 3′ ends of the sequence described below. These primers also should have convenient restriction enzyme sites that will facilitate cloning into an expression vector, preferably a mammalian expression vector.

[1127] For example, if pC4 (Accession No. 209646) is used, the human Fc portion can be ligated into the BamHI cloning site. Note that the 3′ BamHI site should be destroyed. Next, the vector containing the human Fc portion is re-restricted with BamHI, linearizing the vector, and a polynucleotide of the present invention, isolated by the PCR protocol described in Example 1, is ligated into this BamHI site. Note that the polynucleotide is cloned without a stop codon, otherwise a fusion protein will not be produced.

[1128] If the naturally occurring signal sequence is used to produce the secreted protein, pC4 does not need a second signal peptide. Alternatively, if the naturally occurring signal sequence is not used, the vector can be modified to include a heterologous signal sequence. (See, e.g., WO 96/34891)

[1129] Human IgG Fc region:

(SEQ ID NO:1)

GGGATCCGGAGCCCAAATCTTCTGACAAAACTCACACATGCCCACCGTGC
CCAGCACCTGAATTCGAGGGTGCACCGTCAGTCTTCCTCTTCCCCCCAAA
ACCCAAGGACACCCTCATGATCTCCCGGACTCCTGAGGTCACATGCGTGG
TGGTGGACGTAAGCCACGAAGACCCTGAGGTCAAGTTCAACTGGTACGTG
GACGGCGTGGAGGTGCATAATGCCAAGACAAAGCCGCGGGAGGAGCAGTA
CAACAGCACGTACCGTGTGGTCAGCGTCCTCACCGTCCTGCACCAGGACT
GGCTGAATGGCAAGGAGTACAAGTGCAAGGTCTCCAACAAAGCCCTCCCA
ACCCCCATCGAGAAAACCATCTCCAAAGCCAAAGGGCAGCCCCGAGAAC
CACAGGTGTACACCCTGCCCCCATCCCGGGATGAGCTGACCAAGAACCAG
GTCAGCCTGACCTGCCTGGTCAAAGGCTTCTATCCAAGCGACATCGCCGT
GGAGTGGGAGAGCAATGGGCAGCCGGAGAACAACTACAAGACCACGCCTC
CCGTGCTGGACTCCGACGGCTCCTTCTTCCTCTACAGCAAGCTCACCGTG
GACAAGAGCAGGTGGCAGCAGGGGAACGTCTTCTCATGCTCCGTGATGCA
TGAGGCTCTGCACAACCACTACACGCAGAAGAGCCTCTCCCTGTCTCCGG
GTAAATGAGTGCGACGGCCGCGACTCTAGAGGAT

### Example 10

[1130] Production of an Antibody from a Polypeptide

[1131] The antibodies of the present invention can be prepared by a variety of methods. (See, Current Protocols, Chapter 2.) For example, cells expressing a polypeptide of the present invention is administered to an animal to induce the production of sera containing polyclonal antibodies. In a preferred method, a preparation of the secreted protein is prepared and purified to render it substantially free of natural contaminants. Such a preparation is then introduced into an animal in order to produce polyclonal antisera of greater specific activity.

[1132] In the most preferred method, the antibodies of the present invention are monoclonal antibodies (or protein binding fragments thereof). Such monoclonal antibodies can be prepared using hybridoma technology. (Kohler et al., Nature 256:495 (1975); Köhler et al., Eur. J. Immunol. 6:511 (1976); Köhler et al., Eur. J. Immunol. 6:292 (1976); Hammerling et al., in: Monoclonal Antibodies and T-Cell Hybridomas, Elsevier, N.Y., pp. 563-681 (1981).) In general, such procedures involve immunizing an animal (preferably a mouse) with polypeptide or, more preferably, with a secreted polypeptide-expressing cell. Such cells may be cultured in any suitable tissue culture medium; however, it is preferable to culture cells in Earle's modified Eagle's medium supplemented with 10% fetal bovine serum (inactivated at about 56° C.), and supplemented with about 10 g/l of nonessential amino acids, about 1,000 U/mI of penicillin, and about 100 μg/ml of streptomycin.

[1133] The splenocytes of such mice are extracted and fused with a suitable myeloma cell line. Any suitable myeloma cell line may be employed in accordance with the present invention; however, it is preferable to employ the parent myeloma cell line (SP2O), available from the ATCC. After fusion, the resulting hybridoma cells are selectively maintained in HAT medium, and then cloned by limiting dilution as described by Wands et al. (Gastroenterology 80:225-232 (1981).) The hybridoma cells obtained through such a selection are then assayed to identify clones which secrete antibodies capable of binding the polypeptide.

[1134] Alternatively, additional antibodies capable of binding to the polypeptide can be produced in a two-step procedure using anti-diotypic antibodies. Such a method makes use of the fact that antibodies are themselves antigens. and therefore, it is possible to obtain an antibody which binds to a second antibody. In accordance with this method, protein specific antibodies are used to immunize an animal, preferably a mouse. The splenocytes of such an animal are then used to produce hybridoma cells, and the hybridoma cells are screened to identify clones which produce an antibody whose ability to bind to the protein-specific antibody can be blocked by the polypeptide. Such antibodies comprise anti-idiotypic antibodies to the protein-specific antibody and can be used to immunize an animal to induce formation of further protein-specific antibodies.

[1135] It will be appreciated that Fab and F(ab′)2 and other fragments of the antibodies of the present invention may be used according to the methods disclosed herein. Such fragments are typically produced by proteolytic cleavage, using enzymes such as papain (to produce Fab fragments) or pepsin (to produce F(ab′)2 fragments). Alternatively, secreted protein-binding fragments can be produced through the application of recombinant DNA technology or through synthetic chemistry.

[1136] For in vivo use of antibodies in humans, it may be preferable to use “humanized” chimeric monoclonal antibodies. Such antibodies can be produced using genetic constructs derived from hybridoma cells producing the monoclonal antibodies described above. Methods for producing chimeric antibodies are known in the art. (See, for review, Morrison, Science 229:1202 (1985); Oi et al., BioTechniques 4:214 (1986); Cabilly et al., U.S. Pat. No. 4,816,567; Taniguchi et al., EP 171496; Morrison et al., EP 173494; Neuberger et al., WO 8601533; Robinson et al., WO 8702671; Boulianne et al., Nature 312:643 (1984); Neubergeret al., Nature 314:268 (1985).)

### Example 11

[1137] Production Of Secreted Protein For High-Throughput Screening Assays

[1138] The following protocol produces a supernatant containing a polypeptide to be tested. This supernatant can then be used in the Screening Assays described in Examples 13-20.

[1139] First, dilute Poly-D-Lysine (644 587 Boehringer-Mannheim) stock solution (1 mg/ml in PBS) 1:20 in PBS (w/o calcium or magnesium 17-516F Biowhittaker) for a working solution of 50 ug/ml. Add 200 ul of this solution to each well (24 well plates) and incubate at RT for 20 minutes. Be sure to distribute the solution over each well (note: a 12-channel pipetter may be used with tips on every other channel). Aspirate off the Poly-D-Lysine solution and rinse with 1 ml PBS (Phosphate Buffered Saline). The PBS should remain in the well until just prior to plating the cells and plates may be poly-lysine coated in advance for up to two weeks.

[1140] Plate 293T cells (do not carry cells past P+20) at 2×10⁵ cells/well in 0.5 ml DMEM(Dulbecco's Modified Eagle Medium)(with 4.5 G/L glucose and L-glutamine (12-604F Biowhittaker))/10% heat inactivated FBS(14-503F Biowhittaker)/1×Penstrep(17-602E Biowhittaker). Let the cells grow overnight.

[1141] The next day, mix together in a sterile solution basin: 300 ul Lipofectamine (18324-012 Gibco/BRL) and 5 ml Optimem I (31985070 Gibco/BRL)/96-well plate. With a small volume multi-channel pipetter, aliquot approximately 2 ug of an expression vector containing a polynucleotide insert, produced by the methods described in Examples 8 or 9, into an appropriately labeled 96-well round bottom plate. With a multi-channel pipetter, add 50 ul of the Lipofectamine/Optimem I mixture to each well. Pipette up and down gently to mix. Incubate at RT 15-45 minutes. After about 20 minutes, use a multi-channel pipetter to add 150 ul Optimem I to each well. As a control, one plate of vector DNA lacking an insert should be transfected with each set of transfections.

[1142] Preferably, the transfection should be performed by tag-teaming the following tasks. By tag-teaming, hands on time is cut in half, and the cells do not spend too much time on PBS. First, person A aspirates off the media from four 24-well plates of cells, and then person B rinses each well with 0.5 ml PBS. Person A then aspirates off PBS rinse, and person B, using a12-channel pipetter with tips on every other channel, adds the 200 ul of DNA/Lipofectamine/Optimem I complex to the odd wells first, then to the even wells, to each row on the 24-well plates. Incubate at 37° C. for 6 hours.

[1143] While cells are incubating, prepare appropriate media, either 1%BSA in DMEM with 1×penstrep, or CHO-5 media (116.6 mg/L of CaCl2 (anhyd); 0.00130 mg/L CuSO₄—5H₂O; 0.050 mg/L of Fe(NO₃)₃—9H₂O; 0.417 mg/L of FeSO₄—7H₂O; 311.80 mg/L of Kcl; 28.64 mg/L of MgCl₂; 48.84 mg/L of MgSO₄; 6995.50 mg/L of NaCl; 2400.0 mg/L of NaHCO₃; 62.50 mg/L of NaH₂PO₄—H₂O; 71.02 mg/L of Na₂HPO4; 0.4320 mg/L of ZnSO₄—7H₂O; 0.002 mg/L of Arachidonic Acid; 1.022 mg/L of Cholesterol; 0.070 mg/L of DL-alpha-Tocopherol-Acetate; 0.0520 mg/L of Linoleic Acid; 0.010 mg/L of Linolenic Acid; 0.010 mg/L of Myristic Acid; 0.010 mg/L of Oleic Acid; 0.010 mg/L of Palmitric Acid; 0.010 mg/L of Palmitic Acid; 100 mg/L of Pluronic F-68; 0.010 mg/L of Stearic Acid; 2.20 mg/L of Tween 80; 4551 mg/L of D-Glucose; 130.85 mg/ml of L-Alanine; 147.50 mg/ml of L-Arginine-HCL; 7.50 mg/ml of L-Asparagine-H₂O; 6.65 mg/ml of L-Aspartic Acid; 29.56 mg/ml of L-Cystine-2HCL-H₂O; 31.29 mg/ml of L-Cystine-2HCL; 7.35 mg/ml of L-Glutamic Acid; 365.0 mg/ml of L-Glutamine; 18.75 mg/ml of Glycine; 52.48 mg/ml of L-Histidine-HCL-H₂O; 106.97 mg/ml of L-Isoleucine; 111.45 mg/ml of L-Leucine; 163.75 mg/ml of L-Lysine HCL; 32.34 mg/ml of L-Methionine; 68.48 mg/ml of L-Phenylalainine; 40.0 mg/ml of L-Proline; 26.25 mg/ml of L-Serine; 101.05 mg/ml of L-Threonine; 19.22 mg/ml of L-Tryptophan; 91.79 mg/ml of L-Tryrosine-2Na—2H₂O; 99.65 mg/ml of L-Valine; 0.0035 mg/L of Biotin; 3.24 mg/L of D-Ca Pantothenate; 11.78 mg/L of Choline Chloride; 4.65 m/L of Folic Acid; 15.60 mg/L of i-Inositol; 3.02 mg/L of Niacinamide; 3.00 mg/L of Pyridoxal HCL; 0.031 mg/L of Pyridoxine HCL; 0.319 mg/L of Riboflavin; 3.17 mg/L of Thiamine HCL; 0.365 mg/L of Thymidine; and 0.680 mg/L of Vitamin B₁₂; 25 mM of HEPES Buffer; 2.39 mg/L of Na Hypoxanthine; 0.105 mg/L of Lipoic Acid; 0.081 mg/L of Sodium Putrescine-2HCL; 55.0 mg/L of Sodium Pyruvate; 0.0067 mg/L of Sodium Selenite; 20 uM of Ethanolamine; 0.122 mg/L of Ferric Citrate; 41.70 mg/L of Methyl-B-Cyclodextrin complexed with Linoleic Acid; 33.33 mg/L of Methyl-B-Cyclodextrin complexed with Oleic Acid; and 10 mg/L of Methyl-B-Cyclodextrin complexed with Retinal) with 2 mm glutamine and 1×penstrep. (BSA (81-068-3 Bayer) 100 gm dissolved in 1 L DMEM for a 10% BSA stock solution). Filter the media and collect 50 ul for endotoxin assay in 15 ml polystyrene conical.

[1144] The transfection reaction is terminated, preferably by tag-teaming, at the end of the incubation period. Person A aspirates off the transfection media, while person B adds 1.5 ml appropriate media to each well. Incubate at 37° C. for 45 or 72 hours depending on the media used: 1%BSA for 45 hours or CHO-5 for 72 hours.

[1145] On day four, using a 300 ul multichannel pipetter, aliquot 600 ul in one 1 ml deep well plate and the remaining supernatant into a 2 ml deep well. The supernatants from each well can then be used in the assays described in Examples 13-20.

[1146] It is specifically understood that when activity is obtained in any of the assays described below using a supernatant, the activity originates from either the polypeptide directly (e.g., as a secreted protein) or by the polypeptide inducing expression of other proteins, which are then secreted into the supernatant. Thus, the invention further provides a method of identifying the protein in the supernatant characterized by an activity in a particular assay.

### Example 12

[1147] Construction of GAS Reporter Construct

[1148] One signal transduction pathway involved in the differentiation and proliferation of cells is called the Jaks-STATs pathway. Activated proteins in the Jaks-STATs pathway bind to gamma activation site “GAS” elements or interferon-sensitive responsive element (“ISRE”), located in the promoter of many genes. The binding of a protein to these elements alter the expression of the associated gene.

[1149] GAS and ISRE elements are recognized by a class of transcription factors called Signal Transducers and Activators of Transcription, or “STATs.” There are six members of the STATs family. Stat1 and Stat3 are present in many cell types, as is Stat2 (as response to IFN-alpha is widespread). Stat4 is more restricted and is not in many cell types though it has been found in T helper class I, cells after treatment with IL-12. Stat5 was originally called mammary growth factor, but has been found at higher concentrations in other cells including myeloid cells. It can be activated in tissue culture cells by many cytokines.

[1150] The STATs are activated to translocate from the cytoplasm to the nucleus upon tyrosine phosphorylation by a set of kinases known as the Janus Kinase (“Jaks”) family. Jaks represent a distinct family of soluble tyrosinc kinases and include Tyk2, Jak1, Jak2, and Jak3. These kinases display significant sequence similarity and are generally catalytically inactive in resting cells.

[1151] The Jaks are activated by a wide range of receptors summarized in the Table below. (Adapted from review by Schidler and Darnell, Ann. Rev. Biochem. 64:621-51 (1995).) A cytokine receptor family, capable of activating Jaks, is divided into two groups: (a) Class 1 includes receptors for IL-2, IL-3, L-4, IL-6, IL-7, IL-9, IL-11, IL-12, IL-15, Epo, PRL, GH, G-CSF, GM-CSF, LIF, CNTF, and thrombopoietin; and (b) Class 2 includes IFN-a, IFN-g, and IL-10. The Class 1 receptors share a conserved cysteine motif (a set of four conserved cysteines and one tryptophan) and a WSXWS motif (a membrane proximal region encoding Trp-Ser-Xxx-Trp-Ser (SEQ ID NO:2)).

[1152] Thus, on binding of a ligand to a receptor, Jaks are activated, which in turn activate STATs, which then translocate and bind to GAS elements. This entire process is encompassed in the Jaks-STATs signal transduction pathway.

[1153] Therefore, activation of the Jaks-STATs pathway, reflected by the binding of the GAS or the ISRE element, can be used to indicate proteins involved in the proliferation and differentiation of cells. For example, growth factors and cytokines are known to activate the Jaks-STATs pathway. (See Table below.) Thus, by using GAS elements linked to reporter molecules, activators of the Jaks-STATs pathway can be identified.

| | | | | | | GAS (ele- |
|---|---|---|---|---|---|---|
| | | JAKs | | | | ments) or |
| Ligand | tyk2 | Jak1 | Jak2 | Jak3 | STATS | ISRE |
| IFN family | | | | | | |
| IFN-a/B | + | + | − | − | 1, 2, 3 | ISRE |
| IFN-g | | + | + | − | 1 | GAS |
| | | | | | | (IRF1 > |
| | | | | | | Lys6 > |
| | | | | | | IFP) |
| Il-10 | + | ? | ? | − | 1, 3 | |
| gp130 family | | | | | | |
| IL-6 (Pleiotrophic) | + | + | + | ? | 1, 3 | GAS |
| | | | | | | (IRF1 > |
| | | | | | | Lys6 > |
| | | | | | | IFP) |
| Il-11 (Pleiotrophic) | ? | + | ? | ? | 1, 3 | |
| OnM (Pleiotrophic) | ? | + | + | ? | 1, 3 | |
| LIF (Pleiotrophic) | ? | + | + | ? | 1, 3 | |
| CNTF (Pleiotrophic) | −/+ | + | + | ? | 1, 3 | |
| G-CSF (Pleiotrophic) | ? | + | ? | ? | 1, 3 | |
| IL-12 (Pleiotrophic) | + | − | + | + | 1, 3 | |
| g-C family | | | | | | |
| IL-2 (lymphocytes) | − | + | − | + | 1, 3, 5 | GAS |
| IL-4 (lymph/myeloid) | − | + | − | + | 6 | GAS |
| | | | | | | (IRF1 = |
| | | | | | | IFP >> |
| | | | | | | Ly6)(IgH) |
| IL-7 (lymphocytes) | − | + | − | + | 5 | GAS |
| IL-9 (lymphocytes) | − | + | − | + | 5 | GAS |
| IL-13 (lymphocyte) | − | + | ? | ? | 6 | GAS |
| IL-15 | ? | + | ? | + | 5 | GAS |
| gp140 family | | | | | | |
| IL-3 (myeloid) | − | − | + | − | 5 | GAS |
| | | | | | | (IRF1 > |
| | | | | | | IFP >> |
| | | | | | | Ly6) |
| IL-5 (myeloid) | − | − | + | − | 5 | GAS |
| GM-CSF (myeloid) | − | − | + | − | 5 | GAS |
| Growth hormone | | | | | | |
| family | | | | | | |
| GH | ? | − | + | − | 5 | |
| PRL | ? | +/− | + | − | 1, 3, 5 | |
| EPO | ? | − | + | − | 5 | GAS (B- |
| | | | | | | CAS > |
| | | | | | | IRF1 = |
| | | | | | | IFP >> |
| | | | | | | Ly6) |
| Receptor Tyrosine | | | | | | |
| Kinases | | | | | | |
| EGF | ? | + | + | − | 1, 3 | GAS |
| | | | | | | (IRF1) |
| PDGF | ? | + | + | − | 1, 3 | |
| CSF-1 | ? | + | + | − | 1, 3 | GAS (not |
| | | | | | | IRF1) |

[1154] To construct a synthetic GAS containing promoter element, which is used in the Biological Assays described in Examples 13-14, a PCR based strategy is employed to generate a GAS-SV40 promoter sequence. The 5′ primer contains four tandem copies of the GAS binding site found in the IRF1 promoter and previously demonstrated to bind STATs upon induction with a range of cytokines (Rothman et al., Immunity 1:457-468 (1994).), although other GAS or ISRE elements can be used instead. The 5′ primer also contains 18 bp of sequence complementary to the SV40 early promoter sequence and is flanked with an XhoI site. The sequence of the 5′ primer is:

(SEQ ID NO:3)

5′:GCGCCTCGAGATTTCCCCGAAATCTAGATTTCCCCGAAATGATTTCC
CCGAAATGATTTCCCCGAAATATCTGCCATCTCAATTAG:3′

[1155] The downstream primer is complementary to the SV40 promoter and is flanked with a Hind III site: 5′:GCGGCAAGCTTTTTGCAAAGCCTAGGC:3′ (SEQ ID NO:4)

[1156] PCR amplification is performed using the SV40 promoter template present in the B-gal:promoter plasmid obtained from Clontech. The resulting PCR fragment is digested with XhoI/Hind III and subcloned into BLSK2-. (Stratagene.) Sequencing with forward and reverse primers confirms that the insert contains the following sequence:

(SEQ ID NO:5)

5′:CTCGAGATTTCCCCGAAATCTAGATTTCCCCGAAATGATTTCCCCGA
AATGATTTCCCCGAAATATCTGCCATCTCAATTAGTCAGCAACCATAGTC
CCGCCCCTAACTCCGCCCATCCCGCCCCTAACTCCGCCCAGTTCCGCCCA
TTCTCCGCCCCATGGCTGACTAATTTTTTTTATTTATGCAGAGGCCGAGG
CCGCCTCGGCCTCTGAGCTATTCCAGAAGTAGTGAGGAGGCTTTTTTGGA
GGCCTAGGCTTTTGCAAAAAGCTT:3′

[1157] With this GAS promoter element linked to the SV40 promoter, a GAS:SEAP2 reporter construct is next engineered. Here, the reporter molecule is a secreted alkaline phosphatase, or “SEAP.” Clearly, however, any reporter molecule can be instead of SEAP, in this or in any of the other Examples. Well known reporter molecules that can be used instead of SEAP include chloramphenicol acetyltransferase (CAT), luciferase, alkaline phosphatase, B-galactosidase, green fluorescent protein (GFP), or any protein detectable by an antibody.

[1158] The above sequence confirmed synthetic GAS-SV40 promoter element is subcloned into the pSEAP-Promoter vector obtained from Clontech using HindIII and XhoI, effectively replacing the SV40 promoter with the amplified GAS:SV40 promoter element, to create the GAS-SEAP vector. However, this vector does not contain a neomycin resistance gene, and therefore, is not preferred for mammalian expression systems.

[1159] Thus, in order to generate mammalian stable cell lines expressing the GAS-SEAP reporter, the GAS-SEAP cassette is removed from the GAS-SEAP vector using SalI and NotI, and inserted into a backbone vector containing the neomycin resistance gene, such as pGFP-1 (Clontech), using these restriction sites in the multiple cloning site, to create the GAS-SEAP/Neo vector. Once this vector is transfected into mammalian cells, this vector can then be used as a reporter molecule for GAS binding as described in Examples 13-14.

[1160] Other constructs can be made using the above description and replacing GAS with a different promoter sequence. For example, construction of reporter molecules containing NFK-B and EGR promoter sequences are described in Examples 15 and 16. However, many other promoters can be substituted using the protocols described in these Examples. For instance, SRE, IL-2, NFAT, or Osteocalcin promoters can be substituted, alone or in combination (e.g., GAS/NF-KB/EGR, GAS/NF-KB, Il-2/NFAT, or NF-KB/GAS). Similarly, other cell lines can be used to test reporter construct activity, such as HELA (epithelial), HUVEC (endothelial), Reh (B-cell), Saos-2 (osteoblast), HUVAC (aortic), or Cardiomyocyte.

### Example 13

[1161] High-Throughput Screening Assay for T-cell Activity.

[1162] The following protocol is used to assess T-cell activity by identifying factors, such as growth factors and cytokines, that may proliferate or differentiate T-cells. T-cell activity is assessed using the GAS/SEAP/Neo construct produced in Example 12. Thus, factors that increase SEAP activity indicate the ability to activate the Jaks-STATS signal transduction pathway. The T-cell used in this assay is Jurkat T-cells (ATCC Accession No. TIB-152), although Molt-3 cells (ATCC Accession No. CRL-1552) and Molt-4 cells (ATCC Accession No. CRL-1582) cells can also be used.

[1163] Jurkat T-cells are lymphoblastic CD4+ Th1 helper cells. In order to generate stable cell lines, approximately 2 million Jurkat cells are transfected with the GAS-SEAP/neo vector using DMRIE-C (Life Technologies)(transfection procedure described below). The transfected cells are seeded to a density of approximately 20,000 cells per well and transfectants resistant to 1 mg/ml genticin selected. Resistant colonies are expanded and then tested for their response to increasing concentrations of interferon gamma. The dose response of a selected clone is demonstrated.

[1164] Specifically, the following protocol will yield sufficient cells for 75 wells containing 200 ul of cells. Thus, it is either scaled up, or performed in multiple to generate sufficient cells for multiple 96 well plates. Jurkat cells are maintained in RPMI +10% serum with 1%Pen-Strep. Combine 2.5 mls of OPTI-MEM (Life Technologies) with 10 ug of plasmid DNA in a T25 flask. Add 2.5 ml OPTI-MEM containing 50 ul of DMRIE-C and incubate at room temperature for 15-45 mins.

[1165] During the incubation period, count cell concentration, spin down the required number of cells (10⁷ per transfection), and resuspend in OPTI-MEM to a final concentration of 10⁷ cells/ml. Then add 1 ml of 1×10⁷ cells in OPTI-MEM to T25 flask and incubate at 37° C. for 6 hrs. After the incubation, add 10 ml of RPMI+15% serum.

[1166] The Jurkat:GAS-SEAP stable reporter lines are maintained in RPMI+10% serum, 1 mg/ml Genticin, and 1% Pen-Strep. These cells are treated with supernatants containing a polypeptide as produced by the protocol described in Example 11.

[1167] On the day of treatment with the supernatant, the cells should be washed and resuspended in fresh RPMI+10% serum to a density of 500,000 cells per ml. The exact number of cells required will depend on the number of supernatants being screened. For one 96 well plate, approximately 10 million cells (for 10 plates, 100 million cells) are required.

[1168] Transfer the cells to a triangular reservoir boat, in order to dispense the cells into a 96 well dish, using a 12 channel pipette. Using a 12 channel pipette, transfer 200 ul of cells into each well (therefore adding 100,000 cells per well).

[1169] After all the plates have been seeded, 50 ul of the supernatants are transferred directly from the 96 well plate containing the supernatants into each well using a 12 channel pipette. In addition, a dose of exogenous interferon gamma (0.1, 1.0, 10 ng) is added to wells H9, H10, and H11 to serve as additional positive controls for the assay.

[1170] The 96 well dishes containing Jurkat cells treated with supernatants are placed in an incubator for 48 hrs (note: this time is variable between 48-72 hrs). 35 ul samples from each well are then transferred to an opaque 96 well plate using a 12 channel pipette. The opaque plates should be covered (using sellophene covers) and stored at −20° C. until SEAP assays are performed according to Example 17. The plates containing the remaining treated cells are placed at 40° C. and serve as a source of material for repeating the assay on a specific well if desired.

[1171] As a positive control, 100 Unit/ml interferon gamma can be used which is known to activate Jurkat T cells. Over 30 fold induction is typically observed in the positive control wells.

[1172] The above protocol may be used in the generation of both transient, as well as, stable transfected cells, which would be apparent to those of skill in the art.

### Example 14

[1173] High-Throughput Screening Assay Identifying Myeloid Activity

[1174] The following protocol is used to assess myeloid activity by identifying factors, such as growth factors and cytokines, that may proliferate or differentiate myeloid cells. Myeloid cell activity is assessed using the GAS/SEAP/Neo construct produced in Example 12. Thus, factors that increase SEAP activity indicate the ability to activate the Jaks-STATS signal transduction pathway. The myeloid cell used in this assay is U937, a pre-monocyte cell line, although TF-1, HL60, or KG1 can be used.

[1175] To transiently transfect U937 cells with the GAS/SEAP/Neo construct produced in Example 12. a DEAE-Dextran method (Kharbanda et. al., t994, Cell Growth & Differentiation, 5:259-265) is used. First, harvest 2×10⁷ U937 cells and wash with PBS. The U937 cells are usually grown in RPMI 1640 medium containing 10% heat-inactivated fetal bovine serum (FBS) supplemented with 100 units/ml penicillin and 100 mg/ml streptomycin.

[1176] Next, suspend the cells in 1 ml of 20 mM Tris-HCl (pH 7.4) buffer containing 0.5 mg/ml DEAE-Dextran, 8 ug GAS-SEAP2 plasmid DNA, 140 mM NaCl, 5 mM KCl, 375 uM Na₂HPO₄.7H₂O, 1 mM MgCl₂, and 675 uM CaCl₂. Incubate at 37° C. for 45 min.

[1177] Wash the cells with RPMI 1640 medium containing 10% FBS and then resuspend in 10 ml complete medium and incubate at 37° C. for 36 hr.

[1178] The GAS-SEAP/U937 stable cells are obtained by growing the cells in 400 ug/ml G418. The G418-free medium is used for routine growth but every one to two months, the cells should be re-grown in 400 ug/ml G418 for couple of passages.

[1179] These cells are tested by harvesting 1×10⁸ cells (this is enough for ten 96-well plates assay) and wash with PBS. Suspend the cells in 200 ml above described growth medium, with a final density of 5×10⁵ cells/ml. Plate 200 ul cells per well in the 96-well plate (or 1×10⁵ cells/well).

[1180] Add 50 ul of the supernatant prepared by the protocol described in Example 11. Incubate at 37° C. for 48 to 72 hr. As a positive control, 100 Unit/ml interferon gamma can be used which is known to activate U937 cells. Over 30 fold induction is typically observed in the positive control wells. SEAP assay the supernatant according to the protocol described in Example 17.

### Example 15

[1181] High-Throughput Screening Assay Identifying Neuronal Activity.

[1182] When cells undergo differentiation and proliferation, a group of genes are activated through many different signal transduction pathways. One of these genes, EGR1 (early growth response gene 1), is induced in various tissues and cell types upon activation. The promoter of EGR1 is responsible for such induction. Using the EGR1 promoter linked to reporter molecules, activation of cells can be assessed.

[1183] Particularly, the following protocol is used to assess neuronal activity in PC12 cell lines. PC12 cells (rat phenochromocytoma cells) are known to proliferate and/or differentiate by activation with a number of mitogens, such as TPA (tetradecanoyl phorbol acetate), NGF (nerve growth factor), and EGF (epidermal growth factor). The EGR1 gene expression is activated during this treatment. Thus, by stably transfecting PC12 cells with a construct containing an EGR promoter linked to SEAP reporter, activation of PC12 cells can be assessed.

[1184] The EGR/SEAP reporter construct can be assembled by the following protocol. The EGR-1 promoter sequence (−633 to +1)(Sakamoto K et al., Oncogene 6:867-871 (1991)) can be PCR amplified from human genomic DNA using the following primers:

[1185] 5′ GCGCTCGAGGGATGACAGCGATAGAACCCCGG -3′ (SEQ ID NO:6)

[1186] 5′ GCGAAGCTTCGCGACTCCCCGGATCCGCCTC-3′ (SEQ ID NO:7)

[1187] Using the GAS:SEAP/Neo vector produced in Example 12, EGR1 amplified product can then be inserted into this vector. Linearize the GAS:SEAP/Neo vector using restriction enzymes XhoI/HindIII, removing the GAS/SV40 stuffer. Restrict the EGR1 amplified product with these same enzymes. Ligate the vector and the EGR1 promoter.

[1188] To prepare 96 well-plates for cell culture, two mls of a coating solution (1:30 dilution of collagen type I (Upstate Biotech Inc. Cat#08-115) in 30% ethanol (filter sterilized)) is added per one 10 cm plate or 50 ml per well of the 96-well plate, and allowed to air dry for 2 hr.

[1189] PC12 cells are routinely grown in RPMI-1640 medium (Bio Whittaker) containing 10% horse serum (JRH BIOSCIENCES, Cat. # 12449-78P), 5% heat-inactivated fetal bovine serum (FBS) supplemented with 100 units/ml penicillin and 100 ug/ml streptomycin on a precoated 10 cm tissue culture dish. One to four split is done every three to four days. Cells are removed from the plates by scraping and resuspended with pipetting up and down for more than 15 times.

[1190] Transfect the EGR/SEAP/Neo construct into PC12 using the Lipofectamine protocol described in Example 11. EGR-SEAP/PC12 stable cells are obtained by growing the cells in 300 ug/ml G418. The G418-free medium is used for routine growth but every one to two months, the cells should be re-grown in 300 ug/ml G418 for couple of passages.

[1191] To assay for neuronal activity, a 10 cm plate with cells around 70 to 80% confluent is screened by removing the old medium. Wash the cells once with PBS (Phosphate buffered saline). Then starve the cells in low serum medium (RPMI-1640 containing 1% horse serum and 0.5% FBS with antibiotics) overnight.

[1192] The next morning, remove the medium and wash the cells with PBS. Scrape off the cells from the plate, suspend the cells well in 2 ml low serum medium. Count the cell number and add more low serum medium to reach final cell density as 5×10⁵ cells/ml.

[1193] Add 200 ul of the cell suspension to each well of 96-well plate (equivalent to 1×10⁵ cells/well). Add 50 ul supernatant produced by Example 11, 37° C. for 48 to 72 hr. As a positive control, a growth factor known to activate PC12 cells through EGR can be used, such as 50 ng/ul of Neuronal Growth Factor (NGF). Over fifty-fold induction of SEAP is typically seen in the positive control wells. SEAP assay the supernatant according to Example 17.

### Example 16

[1194] High-Throughput Screening Assay for T-cell Activity

[1195] NF-κB (Nuclear Factor κB) is a transcription factor activated by a wide variety of agents including the inflammatory cytokines IL-1 and TNF, CD30 and CD40, lymphotoxin-alpha and lymphotoxin-beta, by exposure to LPS or thrombin, and by expression of certain viral gene products. As a transcription factor, NF-κB regulates the expression of genes involved in immune cell activation, control of apoptosis (NF-κB appears to shield cells from apoptosis), B and T-cell development, anti-viral and antimicrobial responses, and multiple stress responses.

[1196] In non-stimulated conditions, NF-κB is retained in the cytoplasm with I-κB (Inhibitor κB). However, upon stimulation, I-κB is phosphorylated and degraded, causing NF-κB to shuttle to the nucleus, thereby activating transcription of target genes. Target genes activated by NF-κB include IL-2, IL-6, GM-CSF, ICAM-1 and class 1 MHC.

[1197] Due to its central role and ability to respond to a range of stimuli, reporter constructs utilizing the NF-κB promoter element are used to screen the supernatants produced in Example 11. Activators or inhibitors of NF-κB would be useful in treating diseases. For example, inhibitors of NF-κB could be used to treat those diseases related to the acute or chronic activation of NF-κB, such as rheumatoid arthritis.

[1198] To construct a vector containing the NF-κB promoter element, a PCR based strategy is employed. The upstream primer contains four tandem copies of the NF-κB binding site (GGGGACTTTRCCC) (SEQ ID NO:8), 18 bp of sequence complementary to the 5′ end of the SV40 early promoter sequence, and is flanked with an XhoI site:

[1199] 5′:GCGGCCTCGAGGGGACTTTCCCGGGGACTTTCCGGGGACTTTCCGGGAC TTTCCATCCTGCCATCTCAATTAG:3′ (SEQ ID NO:9)

[1200] The downstream primer is complementary to the 3′ end of the SV40 promoter and is flanked with a Hind III site:

[1201] 5′:GCGGCAAGCTTTTTGCAAAGCCTAGGC:3′ (SEQ ID NO:4)

[1202] PCR amplification is performed using the SV40 promoter template present in the pB-gal:promoter plasmid obtained from Clontech. The resulting PCR fragment is digested with XhoI and Hind III and subcloned into BLSK2-. (Stratagene) Sequencing with the T7 and T3 primers confirms the insert contains the following sequence:

(SEQ ID NO:10)

5′:CTCGAGGGGACTTTCCCGGGGACTTTCCGGGGACTTTCCGGGACTTT
CCATCTGCCATCTCAATTAGTCAGCAACCATAGTCCCGCCCCTAACTCCG
CCCATCCCGCCCCTAACTCCGCCCAGTTCCGCCCATTCTCCGCCCCATGG
CTGACTAATTTTTTTTATTTATGCAGAGGCCGAGGCCGCCTCGGCCTCTG
AGCTATTCCAGAAGTAGTGAGGAGGCTTTTTTGGAGGCCTAGGCTTTTGC
AAAAAGCTT:3′

[1203] Next, replace the SV40 minimal promoter element present in the pSEAP2-promoter plasmid (Clontech) with this NF-κB/SV40 fragment using XhoI and HindIII. However, this vector does not contain a neomycin resistance gene, and therefore, is not preferred for mammalian expression systems.

[1204] In order to generate stable mammalian cell lines, the NF-κB/SV40/SEAP cassette is removed from the above NF-κB/SEAP vector using restriction enzymes SalI and NotI, and inserted into a vector containing neomycin resistance. Particularly, the NF-κB/SV40/SEAP cassette was inserted into pGFP-1 (Clontech), replacing the GFP gene, after restricting pGFP-1 with SalI and NotI.

[1205] Once NF-κB/SV40/SEAP/Neo vector is created, stable Jurkat T-cells are created and maintained according to the protocol described in Example 13. Similarly, the method for assaying supernatants with these stable Jurkat T-cells is also described in Example 13. As a positive control, exogenous TNF alpha (0.1,1, 10 ng) is added to wells H9, H10, and H11, with a 5-10 fold activation typically observed.

### Example 17

[1206] Assay for SEAP Activity

[1207] As a reporter molecule for the assays described in Examples 13-16, SEAP activity is assayed using the Tropix Phospho-light Kit (Cat. BP-400) according to the following general procedure. The Tropix Phospho-light Kit supplies the Dilution, Assay, and Reaction Buffers used below.

[1208] Prime a dispenser with the 2.5×Dilution Buffer and dispense 15 μl of 2.5×dilution buffer into Optiplates containing 35 μl of a supernatant. Seal the plates with a plastic sealer and incubate at 65° C. for 30 min. Separate the Optiplates to avoid uneven heating.

[1209] Cool the samples to room temperature for 15 minutes. Empty the dispenser and prime with the Assay Buffer. Add 50 μl Assay Buffer and incubate at room temperature 5 min. Empty the dispenser and prime with the Reaction Buffer (see the table below). Add 50 μl Reaction Buffer and incubate at room temperature for 20 minutes. Since the intensity of the chemiluminescent signal is time dependent, and it takes about 10 minutes to read 5 plates on luminometer, one should treat 5 plates at each time and start the second set 10 minutes later.

[1210] Read the relative light unit in the luminometer. Set H12 as blank, and print the results. An increase in chemiluminescence indicates reporter activity.

Reaction Buffer Formulation:

| # of plates | Rxn buffer diluent (ml) | CSPD (ml) |
|---|---|---|
| 10 | 60 | 3 |
| 11 | 65 | 3.25 |
| 12 | 70 | 3.5 |
| 13 | 75 | 3.75 |
| 14 | 80 | 4 |
| 15 | 85 | 4.25 |
| 16 | 90 | 4.5 |
| 17 | 95 | 4.75 |
| 18 | 100 | 5 |
| 19 | 105 | 5.25 |
| 20 | 110 | 5.5 |
| 21 | 115 | 5.75 |
| 22 | 120 | 6 |
| 23 | 125 | 6.25 |
| 24 | 130 | 6.5 |
| 25 | 135 | 6.75 |
| 26 | 140 | 7 |
| 27 | 145 | 7.25 |
| 28 | 150 | 7.5 |
| 29 | 155 | 7.75 |
| 30 | 160 | 8 |
| 31 | 165 | 8.25 |
| 32 | 170 | 8.5 |
| 33 | 175 | 8.75 |
| 34 | 180 | 9 |
| 35 | 185 | 9.25 |
| 36 | 190 | 9.5 |
| 37 | 195 | 9.75 |
| 38 | 200 | 10 |
| 39 | 205 | 10.25 |
| 40 | 210 | 10.5 |
| 41 | 215 | 10.75 |
| 42 | 220 | 11 |
| 43 | 225 | 11.25 |
| 44 | 230 | 11.5 |
| 45 | 235 | 11.75 |
| 46 | 240 | 12 |
| 47 | 245 | 12.25 |
| 48 | 250 | 12.5 |
| 49 | 255 | 12.75 |
| 50 | 260 | 13 |

### Example 18

[1211] High-Throughput Screening Assay Identifying Changes in Small Molecule Concentration and Membrane Permeability

[1212] Binding of a ligand to a receptor is known to alter intracellular levels of small molecules. such as calcium, potassium, sodium, and pH, as well as alter membrane potential. These alterations can be measured in an assay to identify supernatants which bind to receptors of a particular cell. Although the following protocol describes an assay for calcium, this protocol can easily be modified to detect changes in potassium, sodium, pH, membrane potential, or any other small molecule which is detectable by a fluorescent probe.

[1213] The following assay uses Fluorometric Imaging Plate Reader (“FLIPR”) to measure changes in fluorescent molecules (Molecular Probes) that bind small molecules. Clearly, any fluorescent molecule detecting a small molecule can be used instead of the calcium fluorescent molecule, fluo-4 (molecular Probes, Inc.; catalog no. F-14202), used here.

[1214] For adherent cells, seed the cells at 10,000-20,000 cells/well in a Co-star black 96-well plate with clear bottom. The plate is incubated in a CO₂ incubator for 20 hours. The adherent cells are washed two times in Biotek washer with 200 ul of HBSS (Hank's Balanced Salt Solution) leaving 100 ul of buffer after the final wash.

[1215] A stock solution of 1 mg/ml fluo-4 is made in 10% pluronic acid DMSO. To load the cells with fluo-4, 50 ul of 12 ug/ml fluo-4 is added to each well. The plate is incubated at 37° C. in a CO₂ incubator for 60 min. The plate is washed four times in the Biotek washer with HBSS leaving 100 ul of buffer.

[1216] For non-adherent cells, the cells are spun down from culture media. Cells are re-suspended to 2-5×10⁶ cells/ml with HBSS in a 50-ml conical tube. 4 ul of 1 mg/ml fluo-4 solution in 10% pluronic acid DMSO is added to each ml of cell suspension. The tube is then placed in a 37° C. water bath for 30-60 min. The cells are washed twice with HBSS, resuspended to 1×10⁶ cells/ml, and dispensed into a microplate, 100 ul/well. The plate is centrifuged at 1000 rpm for 5 min. The plate is then washed once in Denley CellWash with 200 ul, followed by an aspiration step to 100 ul final volume.

[1217] For a non-cell based assay, each well contains a fluorescent molecule, such as fluo-4. The supernatant is added to the well, and a change in fluorescence is detected.

[1218] To measure the fluorescence of intracellular calcium, the FLIPR is set for the followlng parameters: (1) System gain is 300-800 mW; (2) Exposure time is 0.4 second; (3) Camera F/stop is F/2; (4) Excitation is 488 nm; (5) Emission is 530 nm; and (6) Sample addition is 50 ul. Increased emission at 530 nm indicates an extracellular signaling event which has resulted in an increase in the intracellular Ca⁺⁺ concentration.

### Example 19

[1219] High-Throughput Screening Assay Identifying-Tyrosine Kinase Activity

[1220] The Protein Tyrosine Kinases (PTK) represent a diverse group of transmembrane and cytoplasmic kinases. Within the Receptor Protein Tyrosine Kinase RPTK) group are receptors for a range of mitogenic and metabolic growth factors including the PDGF, FGF, EGF, NGF, HGF and Insulin receptor subfamilies. In addition there are a large family of RPTKs for which the corresponding ligand is unknown. Ligands for RPTKs include mainly secreted small proteins, but also membrane-bound and extracellular matrix proteins.

[1221] Activation of RPTK by ligands involves ligand-mediated receptor dimerization, resulting in transphosphorylation of the receptor subunits and activation of the cytoplasmic tyrosine kinases. The cytoplasmic tyrosine kinases include receptor associated tyrosine kinases of the src-family (e.g., src, yes, lck, lyn, fyn) and non-receptor linked and cytosolic protein tyrosine kinases, such as the Jak family, members of which mediate signal transduction triggered by the cytokine superfamily of receptors (e.g., the Interleukins, Interferons, GM-CSF, and Leptin).

[1222] Because of the wide range of known factors capable of stimulating tyrosine kinase activity, the identification of novel human secreted proteins capable of activating tyrosine kinase signal transduction pathways are of interest. Therefore, the following protocol is designed to identify those novel human secreted proteins capable of activating the tyrosine kinase signal transduction pathways.

[1223] Seed target cells (e.g., primary keratinocytes) at a density of approximately 25,000 cells per well in a 96 well Loprodyne Silent Screen Plates purchased from Nalge Nunc (Naperville, Ill.). The plates are sterilized with two 30 minute rinses with 100% ethanol, rinsed with water and dried overnight. Some plates are coated for 2 hr with 100 ml of cell culture grade type I collagen (50 mg/ml), gelatin (2%) or polylysine (50 mg/ml), all of which can be purchased from Sioma Chemicals (St. Louis, Mo.) or 10% Matrigel purchased from Becton Dickinson (Bedford, Mass.), or calf serum, rinsed with PBS and stored at 4° C. Cell growth on these plates is assayed by seeding 5,000 cells/well in growth medium and indirect quantitation of cell number through use of alamarBlue as described by the manufacturer Alamar Biosciences, Inc. (Sacramento, Calif.) after 48 hr. Falcon plate covers #3071 from Becton Dickinson (Bedford, Mass.) are used to cover the Loprodyne Silent Screen Plates. Falcon Microtest III cell culture plates can also be used in some proliferation experiments.

[1224] To prepare extracts, A431 cells are seeded onto the nylon membranes of Loprodyne plates (20,000/200 ml/well) and cultured overnight in complete medium. Cells are quiesced by incubation in serum-free basal medium for 24 hr. After 5-20 minutes treatment with EGF (60 ng/ml) or 50 ul of the supernatant produced in Example 11, the medium was removed and 100 ml of extraction buffer ((20 mM HEPES pH 7.5, 0.15 M NaCl, 1% Triton X-100, 0.1% SDS, 2 mM Na3VO4, 2 mM Na4P2O7 and a cocktail of protease inhibitors (# 1836170) obtained from Boeheringer Mannheim (Indianapolis, Ind.) is added to each well and the plate is shaken on a rotating shaker for 5 minutes at 4° C. The plate is then placed in a vacuum transfer manifold and the extract filtered through the 0.45 mm membrane bottoms of each well using house vacuum. Extracts are collected in a 96-well catch/assay plate in the bottom of the vacuum manifold and immediately placed on ice. To obtain extracts clarified by centrifugation, the content of each well, after detergent solubilization for 5 minutes, is removed and centrifuged for 15 minutes at 4° C. at 16,000×g.

[1225] Test the filtered extracts for levels of tyrosine kinase activity. Although many methods of detecting tyrosine kinase activity are known, one method is described here.

[1226] Generally, the tyrosine kinase activity of a supernatant is evaluated by determining its ability to phosphorylate a tyrosine residue on a specific substrate (a biotinylated peptide). Biotinylated peptides that can be used for this purpose include PSK1 (corresponding to amino acids 6-20 of the cell division kinase cdc2-p34) and PSK2 (corresponding to amino acids 1-17 of gastrin). Both peptides are substrates for a range of tyrosine kinases and are available from Boehringer Mannheim.

[1227] The tyrosine kinase reaction is set up by adding the following components in order. First, add 10 ul of 5 uM Biotinylated Peptide, then 10 ul ATP/Mg₂₊ (5 mM ATP/50 mM MgCl₂), then 10 ul of 5×Assay Buffer (40 mM imidazole hydrochloride, pH7.3, 40 mM beta-glycerophosphate, 1 mm EGTA, 100 mM MgCl₂, 5 mM MnCl₂, 0.5 mg/ml BSA), then 5 ul of Sodium Vanadate(1 mM), and then 5 ul of water. Mix the components gently and preincubate the reaction mix at 30° C. for 2 min. Initial the reaction by adding 10 ul of the control enzyme or the filtered supernatant.

[1228] The tyrosine kinase assay reaction is then terminated by adding 10 ul of 120 mm EDTA and place the reactions on ice.

[1229] Tyrosine kinase activity is determined by transferring 50 ul aliquot of reaction mixture to a microtiter plate (MTP) module and incubating at 37° C. for 20 min. This allows the streptavadin coated 96 well plate to associate with the biotinylated peptide. Wash the MTP module with 300 ul/well of PBS four times. Next add 75 ul of anti-phospotyrosine antibody conjugated to horse radish peroxidase(anti-P-Tyr-POD(0.5 u/ml)) to each well and incubate at 37° C. for one hour. Wash the well as above.

[1230] Next add 100 ul of peroxidase substrate solution (Boehringer Mannheim) and incubate at room temperature for at least 5 mins (up to 30 min). Measure the absorbance of the sample at 405 nm by using ELISA reader. The level of bound peroxidase activity is quantitated using an ELISA reader and reflects the level of tyrosine kinase activity.

### Example 20

[1231] High-Throughput Screening Assay Identifying Phosphorylation Activity

[1232] As a potential alternative and/or compliment to the assay of protein tyrosine kinase activity described in Example 19, an assay which detects activation (phosphorylation) of major intracellular signal transduction intermediates can also be used. For example, as described below one particular assay can detect tyrosine phosphorylation of the Erk-1 and Erk-2 kinases. However, phosphorylation of other molecules, such as Raf, JNK, p38 MAP, Map kinase kinase (MEK), MEK kinase, Src, Muscle specific kinase (MuSK), IRAK, Tec, and Janus, as well as any other phosphoserine, phosphotyrosine, or phosphothreonine molecule, can be detected by substituting these molecules for Erk-1 or Erk-2 in the following assay.

[1233] Specifically, assay plates are made by coating the wells of a 96-well ELISA plate with 0.1 ml of protein G (1 ug/ml) for 2 hr at room temp, (RT). The plates are then rinsed with PBS and blocked with 3% BSA/PBS for 1 hr at RT. The protein G plates are then treated with 2 commercial monoclonal antibodies (100 ng/well) against Erk-1 and Erk-2 (1 hr at RT) (Santa Cruz Biotechnology). (To detect other molecules, this step can easily be modified by substituting a monoclonal antibody detecting any of the above described molecules.) After 3-5 rinses with PBS, the plates are stored at 4° C. until use.

[1234] A431 cells are seeded at 20,000/well in a 96-well Loprodyne filterplate and cultured overnight in growth medium. The cells are then starved for 48 hr in basal medium (DMEM) and then treated with EGF (6 ng/well) or 50 ul of the supernatants obtained in Example 11 for 5-20 minutes. The cells are then solubilized and extracts filtered directly into the assay plate.

[1235] After incubation with the extract for 1 hr at RT, the wells are again rinsed. As a positive control, a commercial preparation of MAP kinase (10 ng/well) is used in place of A431 extract. Plates are then treated with a commercial polyclonal (rabbit) antibody (1 ug/ml) which specifically recognizes the phosphorylated epitope of the Erk-1 and Erk-2 kinases (1 hr at RT). This antibody is biotinylated by standard procedures. The bound polyclonal antibody is then quantitated by successive incubations with Europium-streptavidin and Europium fluorescence enhancing reagent in the Wallac DELFIA instrument (time-resolved fluorescence). An increased fluorescent signal over background indicates a phosphorylation.

### Example 21

[1236] Method of Determining Alterations in a Gene Corresponding to a Polynucleotide

[1237] RNA isolated from entire families or individual patients presenting with a phenotype of interest (such as a disease) is be isolated. cDNA is then generated from these RNA samples using protocols known in the art. (See, Sambrook.) The cDNA is then used as a template for PCR, employing primers surrounding regions of interest in SEQ ID NO:X. Suggested PCR conditions consist of 35 cycles at 95° C. for 30 seconds; 60-120 seconds at 52-58° C.; and 60-120 seconds at 70° C., using buffer solutions described in Sidransky, D., et al., Science 252:706 (1991).

[1238] PCR products are then sequenced using primers labeled at their 5′ end with T4 polynucleotide kinase, employing SequiTherm Polymerase. (Epicentre Technologies). The intron-exon borders of selected exons is also determined and genomic PCR products analyzed to confirm the results. PCR products harboring suspected mutations is then cloned and sequenced to validate the results of the direct sequencing.

[1239] PCR products is cloned into T-tailed vectors as described in Holton, T. A. and Graham, M. W., Nucleic Acids Research, 19:1156 (1991) and sequenced with T7 polymerase (United States Biochemical). Affected individuals are identified by mutations not present in unaffected individuals.

[1240] Genomic rearrangements are also observed as a method of determining alterations in a gene corresponding to a polynucleotide. Genomic clones isolated according to Example 2 are nick-translated with digoxigenindeoxy-uridine 5′-triphosphate (Boehringer Manheim), and FISH performed as described in Johnson, Cg. et al., Methods Cell Biol. 35:73-99 (1991). Hybridization with the labeled probe is carried out using a vast excess of human cot-1 DNA for specific hybridization to the corresponding genomic locus.

[1241] Chromosomes are counterstained with 4,6-diamino-2-phenylidole and propidium iodide, producing a combination of C- and R-bands. Aligned images for precise mapping are obtained using a triple-band filter set (Chroma Technology, Brattleboro, Vt.) in combination with a cooled charge-coupled device camera (Photometrics, Tucson, Ariz.) and variable excitation wavelength filters. (Johnson, Cv. et al., Genet. Anal. Tech. Appl., 8:75 (1991).) Image collection, analysis and chromosomal fractional length measurements are performed using the ISee Graphical Program System. (Inovision Corporation, Durham, N.C.) Chromosome alterations of the genomic region hybridized by the probe are identified as insertions, deletions, and translocations. These alterations are used as a diagnostic marker for an associated disease.

### Example 22

[1242] Method of Detecting Abnormal Levels of a Polypeptide in a Biological Sample

[1243] A polypeptide of the present invention can be detected in a biological sample, and if an increased or decreased level of the polypeptide is detected, this polypeptide is a marker for a particular phenotype. Methods of detection are numerous, and thus, it is understood that one skilled in the art can modify the following assay to fit their particular needs.

[1244] For example, antibody-sandwich ELISAs are used to detect polypeptides in a sample, preferably a biological sample. Wells of a microtiter plate are coated with specific antibodies, at a final concentration of 0.2 to 10 ug/ml. The antibodies are either monoclonal or polyclonal and are produced by the method described in Example 10. The wells are blocked so that non-specific binding of the polypeptide to the well is reduced.

[1245] The coated wells are then incubated for >2 hours at RT with a sample containing the polypeptide. Preferably, serial dilutions of the sample should be used to validate results. The plates are then washed three times with deionized or distilled water to remove unbounded polypeptide.

[1246] Next, 50 ul of specific antibody-alkaline phosphatase conjugate, at a concentration of 25-400 ng, is added and incubated for 2 hours at room temperature.

[1247] The plates are again washed three times with deionized or distilled water to remove unbounded conjugate.

[1248] Add 75 ul of 4-methylumbelliferyl phosphate (MUP) or p-nitrophenyl phosphate (NPP) substrate solution to each well and incubate 1 hour at room temperature. Measure the reaction by a microtiter plate reader. Prepare a standard curve, using serial dilutions of a control sample, and plot polypeptide concentration on the X-axis (log scale) and fluorescence or absorbance of the Y-axis (linear scale). Interpolate the concentration of the polypeptide in the sample using the standard curve.

### Example 23

[1249] Formulating a Polypeptide

[1250] The secreted polypeptide composition will be formulated and dosed in a fashion consistent with good medical practice, taking into account the clinical condition of the individual patient (especially the side effects of treatment with the secreted polypeptide alone), the site of delivery, the method of administration, the scheduling of administration, and other factors known to practitioners. The “effective amount” for purposes herein is thus determined by such considerations.

[1251] As a general proposition, the total pharmaceutically effective amount of secreted polypeptide administered parenterally per dose will be in the range of about 1 μg/kg/day to 10 mg/kg/day of patient body weight, although, as noted above, this will be subject to therapeutic discretion. More preferably, this dose is at least 0.01 mg/kg/day, and most preferably for humans between about 0.01 and 1 mg/kg/day for the hormone. If given continuously, the secreted polypeptide is typically administered at a dose rate of about 1 μg/kg/hour to about 50 μg/kg/hour, either by 1-4 injections per day or by continuous subcutaneous infusions, for example, using a mini-pump. An intravenous bag solution may also be employed. The length of treatment needed to observe changes and the interval following treatment for responses to occur appears to vary depending on the desired effect.

[1252] Pharmaceutical compositions containing the secreted protein of the invention are administered orally, rectally, parenterally, intracistemally, intravaginally, intraperitoneally, topically (as by powders, ointments, gels, drops or transdermal patch), bucally, or as an oral or nasal spray. “Pharmaceutically acceptable carrier” refers to a non-toxic solid, semisolid or liquid filler, diluent, encapsulating material or formulation auxiliary of any type. The term “parenteral” as used herein refers to modes of administration which include intravenous, intramuscular, intraperitoneal, int intrasternal subcutaneous and intraarticular injection and infusion.

[1253] The secreted polypeptide is also suitably administered by sustained-release systems. Suitable examples of sustained-release compositions include semi-permeable polymer matrices in the form of shaped articles, e.g., films, or mirocapsules. Sustained-release matrices include polylactides (U.S. Pat. No. 3,773,919, EP 58,481), copolymers of L-glutamic acid and gamma-ethyl-L-glutamate (Sidman, U. et al., Biopolymers 22:547-556 (1983)), poly (2-hydroxyethyl methacrylate) (R. Langer et al., J. Biomed. Mater. Res. 15:167-277 (1981), and R. Langer, Chem. Tech. 12:98-105 (1982)), ethylene vinyl acetate (R. Langer et al.) or poly-D-(−)-3-hydroxybutyric acid (EP 133,988). Sustained-release compositions also include liposomally entrapped polypeptides. Liposomes containing the secreted polypeptide are prepared by methods known per se: DE 3,218,121; Epstein et al., Proc. Natl. Acad. Sci. USA 82:3688-3692 (1985); Hwang et al., Proc. Natl. Acad. Sci. USA 77:4030-4034 (1980); EP 52,322; EP 36,676; EP 88,046; EP 143,949; EP 142,641; Japanese Pat. Appl. 83-118008; U.S. Pat. Nos. 4,485,045 and 4,544,545; and EP 102,324. Ordinarily, the liposomes are of the small (about 200-800 Angstroms) unilamellar type in which the lipid content is greater than about 30 mol. percent cholesterol, the selected proportion being adjusted for the optimal secreted polypeptide therapy.

[1254] For parenteral administration, in one embodiment, the secreted polypeptide is formulated generally by mixing it at the desired degree of purity, in a unit dosage injectable form (solution, suspension, or emulsion), with a pharmaceutically acceptable carrier, i.e., one that is non-toxic to recipients at the dosages and concentrations employed and is compatible with other ingredients of the formulation. For example, the formulation preferably does not include oxidizing agents and other compounds that are known to be deleterious to polypeptides.

[1255] Generally, the formulations are prepared by contacting the polypeptide uniformly and intimately with liquid carriers or finely divided solid carriers or both. Then, if necessary, the product is shaped into the desired formulation. Preferably the carrier is a parenteral carrier, more preferably a solution that is isotonic with the blood of the recipient. Examples of such carrier vehicles include water, saline, Ringer's solution, and dextrose solution. Non-aqueous vehicles such as fixed oils and ethyl oleate are also useful herein, as well as liposomes.

[1256] The carrier suitably contains minor amounts of additives such as substances that enhance isotonicity and chemical stability. Such materials are non-toxic to recipients at the dosages and concentrations employed, and include buffers such as phosphate, citrate, succinate, acetic acid, and other organic acids or their salts; antioxidants such as ascorbic acid; low molecular weight (less than about ten residues) polypeptides, e.g., polyarginine or tripeptides; proteins, such as serum albumin, gelatin, or immunoglobulins; hydrophilic polymers such as polyvinylpyrrolidone; amino acids, such as glycine, glutamic acid, aspartic acid, or arginine; monosaccharides, disaccharides, and other carbohydrates including cellulose or its derivatives, glucose, manose, or dextrins; chelating agents such as EDTA; sugar alcohols such as mannitol or sorbitol; counterions such as sodium; and/or nonionic surfactants such as polysorbates, poloxamers, or PEG.

[1257] The secreted polypeptide is typically formulated in such vehicles at a concentration of about 0.1 mg/ml to 100 mg/ml, preferably 1-10 mg/ml, at a pH of about 3 to 8. It will be understood that the use of certain of the foregoing excipients, carriers, or stabilizers will result in the formation of polypeptide salts.

[1258] Any polypeptide to be used for therapeutic administration can be sterile. Sterility is readily accomplished by filtration through sterile filtration membranes (e.g., 0.2 micron membranes). Therapeutic polypeptide compositions generally are placed into a container having a sterile access port, for example, an intravenous solution bag or vial having a stopper pierceable by a hypodermic injection needle.

[1259] Polypeptides ordinarily will be stored in unit or multi-dose containers, for example, sealed ampoules or vials, as an aqueous solution or as a lyophilized formulation for reconstitution. As an example of a lyophilized formulation, 10-ml vials are filled with 5 ml of sterile-filtered 1% (w/v) aqueous polypeptide solution, and the resulting mixture is lyophilized. The infusion solution is prepared by reconstituting the lyophilized polypeptide using bacteriostatic Water-for-Injection.

[1260] The invention also provides a pharmaceutical pack or kit comprising one or more containers filled with one or more of the ingredients of the pharmaceutical compositions of the invention. Associated with such container(s) can be a notice in the form prescribed by a governmental agency regulating the manufacture, use or sale of pharmaceuticals or biological products, which notice reflects approval by the agency of manufacture, use or sale for human administration. In addition, the polypeptides of the present invention may be employed in conjunction with other therapeutic compounds.

### Example 24

[1261] Method of Treating Decreased Levels of the Polypeptide

[1262] It will be appreciated that conditions caused by a decrease in the standard or normal expression level of a secreted protein in an individual can be treated by administering the polypeptide of the present invention, preferably in the secreted form. Thus, the invention also provides a method of treatment of an individual in need of an increased level of the polypeptide comprising administering to such an individual a pharmaceutical composition comprising an amount of the polypeptide to increase the activity level of the polypeptide in such an individual.

[1263] For example, a patient with decreased levels of a polypeptide receives a daily dose 0.1-100 ug/kg of the polypeptide for six consecutive days. Preferably, the polypeptide is in the secreted form. The exact details of the dosing scheme, based on administration and formulation, are provided in Example 23.

### Example 25

[1264] Method of Treating Increased Levels of the Polypeptide

[1265] Antisense technology is used to inhibit production of a polypeptide of the present invention. This technology is one example of a method of decreasing levels of a polypeptide, preferably a secreted form, due to a variety of etiologies, such as cancer.

[1266] For example, a patient diagnosed with abnormally increased levels of a polypeptide is administered intravenously antisense polynucleotides at 0.5, 1.0, 1.5, 2.0 and 3.0 mg/kg day for 21 days. This treatment is repeated after a 7-day rest period if the treatment was well tolerated. The formulation of the antisense polynucleotide is provided in Example 23.

### Example 26

[1267] Method of Treatment Using Gene Therapy

[1268] One method of gene therapy transplants fibroblasts, which are capable of expressing a polypeptide, onto a patient. Generally, fibroblasts are obtained from a subject by skin biopsy. The resulting tissue is placed in tissue-culture medium and separated into small pieces. Small chunks of the tissue are placed on a wet surface of a tissue culture flask, approximately ten pieces are placed in each flask. The flask is turned upside down, closed tight and left at room temperature over night. After 24 hours at room temperature, the flask is inverted and the chunks of tissue remain fixed to the bottom of the flask and fresh media (e.g., Ham's F12 media, with 10% FBS, penicillin and streptomycin) is added. The flasks are then incubated at 37° C. for approximately one week.

[1269] At this time, fresh media is added and subsequently changed every several days. After an additional two weeks in culture, a monolayer of fibroblasts emerge. The monolayer is trypsinized and scaled into larger flasks.

[1270] pMV-7 (Kirschmeier, P. T. et al., DNA, 7:219-25 (1988)), flanked by the long terminal repeats of the Moloney murine sarcoma virus, is digested with EcoRI and HindIII and subsequently treated with calf intestinal phosphatase. The linear vector is fractionated on agarose gel and purified, using glass beads.

[1271] The cDNA encoding a polypeptide of the present invention can be amplified using PCR primers which correspond to the 5′ and 3′ end sequences respectively as set forth in Example 1. Preferably, the 5′ primer contains an EcoRI site and the 3′ primer includes a HindIII site. Equal quantities of the Moloney murine sarcoma virus linear backbone and the amplified EcoRI and HindIII fragment are added together, in the presence of T4 DNA ligase. The resulting mixture is maintained under conditions appropriate for ligation of the two fragments. The ligation mixture is then used to transform bacteria HB101, which are then plated onto agar containing kanamycin for the purpose of confirming that the vector has the gene of interest properly inserted.

[1272] The amphotropic pA317 or GP+am12 packaging cells are grown in tissue culture to confluent density in Dulbecco's Modified Eagles Medium (DMEM) with 10% calf serum (CS), penicillin and streptomycin. The MSV vector containing the gene is then added to the media and the packaging cells transduced with the vector. The packaging cells now produce infectious viral particles containing the gene (the packaging cells are now referred to as producer cells).

[1273] Fresh media is added to the transduced producer cells, and subsequently, the media is harvested from a 10 cm plate of confluent producer cells. The spent media, containing the infectious viral particles, is filtered through a millipore filter to remove detached producer cells and this media is then used to infect fibroblast cells. Media is removed from a sub-confluent plate of fibroblasts and quickly replaced with the media from the producer cells. This media is removed and replaced with fresh media. If the titer of virus is high, then virtually all fibroblasts will be infected and no selection is required. If the titer is very low, then it is necessary to use a retroviral vector that has a selectable marker, such as neo or his. Once the fibroblasts have been efficiently infected, the fibroblasts are analyzed to determine whether protein is produced.

[1274] The engineered fibroblasts are then transplanted onto the host, either alone or after having been grown to confluence on cytodex 3 microcarrier beads.

### Example 27

[1275] Method of Treatment Using Gene Therapy—In Vivo

[1276] Another aspect of the present invention is using in vivo gene therapy methods to treat disorders, diseases and conditions. The gene therapy method relates to the introduction of naked nucleic acid (DNA, RNA, and antisense DNA or RNA) sequences into an animal to increase or decrease the expression of the polypeptide. The polynucleotide of the present invention may be operatively linked to a promoter or any other genetic elements necessary for the expression of the polypeptide by the target tissue. Such gene therapy and delivery techniques and methods are known in the art, see, for example, WO90/11092, WO98/1 1779; U.S. Pat. Nos. 5,693,622, 5,705,151, 5,580,859; Tabata H. et al. (1997) Cardiovasc. Res. 35(3):470-479, Chao J et al. (1997) Pharmacol. Res. 35(6):517-522, Wolff J. A. (1997) Neuromuscul. Disord. 7(5):314-318, Schwartz B. et al. (1996) Gene Ther. 3(5):405-411, Tsurumi Y. et al. (1996) Circulation 94(12):3281-3290 (incorporated herein by reference).

[1277] The polynucleotide constructs may be delivered by any method that delivers injectable materials to the cells of an animal, such as, injection into the interstitial space of tissues (heart, muscle, skin, lung, liver, intestine and the like). The polynucleotide constructs can be delivered in a pharmaceutically acceptable liquid or aqueous carrier.

[1278] The term “naked” polynucleotide, DNA or RNA, refers to sequences that are free from any delivery vehicle that acts to assist, promote, or facilitate entry into the cell, including viral sequences, viral particles, liposome formulations, lipofectin or precipitating agents and the like. However, the polynucleotides of the present invention may also be delivered in liposome formulations (such as those taught in Feigner P. L. et al. (1995) Ann. NY Acad. Sci. 772:126-139 and Abdallah B. et al. (1995) Biol. Cell 85(1):1-7) which can be prepared by methods well known to those skilled in the art.

[1279] The polynucleotide vector constructs used in the gene therapy method are preferably constructs that will not integrate into the host genome nor will they contain sequences that allow for replication. Any strong promoter known to those skilled in the art can be used for driving the expression of DNA. Unlike other gene therapies techniques, one major advantage of introducing naked nucleic acid sequences into target cells is the transitory nature of the polynucleotide synthesis in the cells. Studies have shown that non-replicating DNA sequences can be introduced into cells to provide production of the desired polypeptide for periods of up to six months.

[1280] The polynucleotide construct can be delivered to the interstitial space of tissues within the an animal, including of muscle, skin, brain, lung, liver, spleen, bone marrow, thymus, heart, lymph, blood, bone, cartilage, pancreas, kidney, gall bladder, stomach, intestine, testis, ovary, uterus, rectum, nervous system, eye, gland, and connective tissue. Interstitial space of the tissues comprises the intercellular fluid, mucopolysaccharide matrix among the reticular fibers of organ tissues, elastic fibers in the walls of vessels or chambers, collagen fibers of fibrous tissues, or that same matrix within connective tissue ensheathing muscle cells or in the lacunae of bone. It is similarly the space occupied by the plasma of the circulation and the lymph fluid of the lymphatic channels. Delivery to the interstitial space of muscle tissue is preferred for the reasons discussed below. They may be conveniently delivered by injection into the tissues comprising these cells. They are preferably delivered to and expressed in persistent, non-dividing cells which are differentiated, although delivery and expression may be achieved in non-differentiated or less completely differentiated cells, such as, for example, stem cells of blood or skin fibroblasts. In vivo muscle cells are particularly competent in their ability to take up and express polynucleotides.

[1281] For the naked polynucleotide injection, an effective dosage amount of DNA or RNA will be in the range of from about 0.05 g/kg body weight to about 50 mg/kg body weight. Preferably the dosage will be from about 0.005 mg/kg to about 20 mg/kg and more preferably from about 0.05 mg/kg to about 5 mg/kg. Of course, as the artisan of ordinary skill will appreciate, this dosage will vary according to the tissue site of injection. The appropriate and effective dosage of nucleic acid sequence can readily be determined by those of ordinary skill in the art and may depend on the condition being treated and the route of administration. The preferred route of administration is by the parenteral route of injection into the interstitial space of tissues. However, other parenteral routes may also be used, such as, inhalation of an aerosol formulation particularly for delivery to lungs or bronchial tissues, throat or mucous membranes of the nose. In addition, naked polynucleotide constructs can be delivered to arteries during angioplasty by the catheter used in the procedure.

[1282] The dose response effects of injected polynucleotide in muscle in vivo is determined as follows. Suitable template DNA for production of mRNA coding for polypeptide of the present invention is prepared in accordance with a standard recombinant DNA methodology. The template DNA, which may be either circular or linear, is either used as naked DNA or complexed with liposomes. The quadriceps muscles of mice are then injected with various amounts of the template DNA.

[1283] Five to six week old female and male Balb/C mice are anesthetized by intraperitoneal injection with 0.3 ml of 2.5% Avertin. A 1.5 cm incision is made on the anterior thigh, and the quadriceps muscle is directly visualized. The template DNA is injected in 0.1 ml of carrier in a 1 cc syringe through a 27 gauge needle over one minute, approximately 0.5 cm from the distal insertion site of the muscle into the knee and about 0.2 cm deep. A suture is placed over the injection site for future localization, and the skin is closed with stainless steel clips.

[1284] After an appropriate incubation time (e.g., 7 days) muscle extracts are prepared by excising the entire quadriceps. Every fifth 15 um cross-section of the individual quadriceps muscles is histochemically stained for protein expression. A time course for protein expression may be done in a similar fashion except that quadriceps from different mice are harvested at different times. Persistence of DNA in muscle following injection may be determined by Southern blot analysis after preparing total cellular DNA and HIRT supernatants from injected and control mice. The results of the above experimentation in mice can be use to extrapolate proper dosages and other treatment parameters in humans and other animals using naked DNA.

### Example 28

[1285] Transonic Animals.

[1286] The polypeptides of the invention can also be expressed in transgenic animals. Animals of any species, including, but not limited to, mice, rats, rabbits, hamsters, guinea pigs, pigs, micro-pigs, goats, sheep, cows and non-human primates, e.g., baboons, monkeys, and chimpanzees may be used to generate transgenic animals. In a specific embodiment, techniques described herein or otherwise known in the art, are used to express polypeptides of the invention in humans, as part of a gene therapy protocol.

[1287] Any technique known in the art may be used to introduce the transgene (i.e., polynucleotides of the invention) into animals to produce the founder lines of transgenic animals. Such techniques include, but are not limited to, pronuclear microinjection (Paterson et al., Appl. Microbiol. Biotechnol. 40:691-698 (1994); Carver et al., Biotechnology (NY) 11:1263-1270 (1993); Wright et al., Biotechnology (NY) 9:830-834 (1991); and Hoppe et al., U.S. Pat. No. 4,873,191 (1989)); retrovirus mediated gene transfer into germ lines (Van der Putten et al., Proc. Natl. Acad. Sci., USA 82:6148-6152 (1985)), blastocysts or embryos; gene targeting in embryonic stem cells (Thompson et al., Cell 56:313-321 (1989)); electroporation of cells or embryos (Lo, 1983, Mol Cell. Biol. 3:1803-1814 (1983)); introduction of the polynucleotides of the invention using a gene gun (see, e.g., Ulmer et al., Science 259:1745 (1993); introducing nucleic acid constructs into embryonic pleuripotent stem cells and transferring the stem cells back into the blastocyst; and sperm-mediated gene transfer (Lavitrano et al., Cell 57:717-723 (1989); etc. For a review of such techniques, see Gordon, “Transgenic Animals,” Intl. Rev. Cytol. 115:171-229 (1989), which is incorporated by reference herein in its entirety.

[1288] Any technique known in the art may be used to produce transgenic clones containing polynucleotides of the invention, for example, nuclear transfer into enucleated oocytes of nuclei from cultured embryonic, fetal, or adult cells induced to quiescence (Campell et al., Nature 380:64-66 (1996); Wilmut et al., Nature 385:810-813 (1997)).

[1289] The present invention provides for transgenic animals that carry the transgene in all their cells, as well as animals which carry the transgene in some, but not all their cells, i.e., mosaic animals or chimeric. The transgene may be integrated as a single transgene or as multiple copies such as in concatamers, e.g., head-to-head tandems or head-to-tail tandems. The transgene may also be selectively introduced into and activated in a particular cell type by following, for example, the teaching of Lasko et al. (Lasko et al., Proc. Natl. Acad. Sci. USA 89:6232-6236 (1992)). The regulatory sequences required for such a cell-type specific activation will depend upon the particular cell type of interest, and will be apparent to those of skill in the art. When it is desired that the polynucleotide transgene be integrated into the chromosomal site of the endogenous gene, gene targeting is preferred. Briefly, when such a technique is to be utilized, vectors containing some nucleotide sequences homologous to the endogenous gene are designed for the purpose of integrating, via homologous recombination with chromosomal sequences, into and disrupting the function of the nucleotide sequence of the endogenous gene. The transgene may also be selectively introduced into a particular cell type, thus inactivating the endogenous gene in only that cell type, by following, for example, the teaching of Gu et al. (Gu et al., Science 265:103-106 (1994)). The regulatory sequences required for such a cell-type specific inactivation will depend upon the particular cell type of interest, and will be apparent to those of skill in the art.

[1290] Once transgenic animals have been generated, the expression of the recombinant gene may be assayed utilizing standard techniques. Initial screening may be accomplished by Southern blot analysis or PCR techniques to analyze animal tissues to verify that integration of the transgene has taken place. The level of mRNA expression of the transgene in the tissues of the transgenic animals may also be assessed using techniques which include, but are not limited to, Northern blot analysis of tissue samples obtained from the animal, in situ hybridization analysis, and reverse transcriptase-PCR (rt-PCR). Samples of transgenic gene-expressing tissue may also be evaluated immunocytochemically or immunohistochemically using antibodies specific for the transgene product.

[1291] Once the founder animals are produced, they may be bred, inbred, outbred, or crossbred to produce colonies of the particular animal. Examples of such breeding strategies include, but are not limited to: outbreeding of founder animals with more than one integration site in order to establish separate lines; inbreeding of separate lines in order to produce compound transgenics that express the transgene at higher levels because of the effects of additive expression of each transgene; crossing of heterozygous transgenic animals to produce animals homozygous for a given integration site in order to both augment expression and eliminate the need for screening of animals by DNA analysis; crossing of separate homozygous lines to produce compound heterozygous or homozygous lines; and breeding to place the transgene on a distinct background that is appropriate for an experimental model of interest.

[1292] Transgenic animals of the invention have uses which include, but are not limited to, animal model systems useful in elaborating the biological function of polypeptides of the present invention, studying conditions and/or disorders associated with aberrant expression, and in screening for compounds effective in ameliorating such conditions and/or disorders.

### Example 29

[1293] Knock-Out Animals.

[1294] Endogenous gene expression can also be reduced by inactivating or “knocking out” the gene and/or its promoter using targeted homologous recombination. (E.g., see Smithies et al., Nature 317:230-234 (1985); Thomas & Capecchi, Cell 51:503-512 (1987); Thompson et al., Cell 5:313-321 (1989): each of which is incorporated by reference herein in its entirety). For example, a mutant, non-functional polynucleotide of the invention (or a completely unrelated DNA sequence) flanked by DNA homologous to the endogenous polynucleotide sequence (either the coding regions or regulatory regions of the gene) can be used, with or without a selectable marker and/or a negative selectable marker, to transfect cells that express polypeptides of the invention in vivo. In another embodiment, techniques known in the art are used to generate knockouts in cells that contain, but do not express the gene of interest. Insertion of the DNA construct, via targeted homologous recombination, results in inactivation of the targeted gene. Such approaches are particularly suited in research and agricultural fields where modifications to embryonic stem cells can be used to generate animal offspring with an inactive targeted gene (e.g., see Thomas & Capecchi 1987 and Thompson 1989, supra). However this approach can be routinely adapted for use in humans provided the recombinant DNA constructs are directly administered or targeted to the required site in vivo using appropriate viral vectors that will be apparent to those of skill in the art.

[1295] In further embodiments of the invention, cells that are genetically engineered to express the polypeptides of the invention, or alternatively, that are genetically engineered not to express the polypeptides of the invention (e.g., knockouts) are administered to a patient in vivo. Such cells may be obtained from the patient (i.e., animal, including human) or an MHC compatible donor and can include, but are not limited to fibroblasts, bone marrow cells, blood cells (e.g., lymphocytes), adipocytes, muscle cells, endothelial cells etc. The cells are genetically engineered in vitro using recombinant DNA techniques to introduce the coding sequence of polypeptides of the invention into the cells, or alternatively, to disrupt the coding sequence and/or endogenous regulatory sequence associated with the polypeptides of the invention, e.g., by transduction (using viral vectors, and preferably vectors that integrate the transgene into the cell genome) or transfection procedures, including, but not limited to, the use of plasmids, cosmids, YACs, naked DNA, electroporation, liposomes, etc. The coding sequence of the polypeptides of the invention can be placed under the control of a strong constitutive or inducible promoter or promoter/enhancer to achieve expression. and preferably secretion, of the polypeptides of the invention. The engineered cells which express and preferably secrete the polypeptides of the invention can be introduced into the patient systemically, e.g., in the circulation, or intraperitoneally.

[1296] Alternatively, the cells can be incorporated into a matrix and implanted in the body, e.g., genetically engineered fibroblasts can be implanted as part of a skin graft; genetically engineered endothelial cells can be implanted as part of a lymphatic or vascular graft. (See, for example, Anderson et al. U.S. Pat. No. 5,399,349; and Mulligan & Wilson, U.S. Pat. No. 5,460,959 each of which is incorporated by reference herein in its entirety).

[1297] When the cells to be administered are non-autologous or non-MHC compatible cells, they can be administered using well known techniques which prevent the development of a host immune response against the introduced cells. For example, the cells may be introduced in an encapsulated form which, while allowing for an exchange of components with the immediate extracellular environment, does not allow the introduced cells to be recognized by the host immune system.

[1298] Transgenic and “knock-out” animals of the invention have uses which include, but are not limited to, animal model systems useful in elaborating the biological function of polypeptides of the present invention, studying conditions and/or disorders associated with aberrant expression, and in screening for compounds effective in ameliorating such conditions and/or disorders.

[1299] It will be clear that the invention may be practiced otherwise than as particularly described in the foregoing description and examples. Numerous modifications and variations of the present invention are possible in light of the above teachings and, therefore, are within the scope of the appended claims.

[1300] The entire disclosure of each document cited (including patents, patent applications, journal articles, abstracts, laboratory manuals, books, or other disclosures) in the Background of the Invention, Detailed Description, and Examples is hereby incorporated herein by reference. Further, the hard copy of the sequence listing submitted herewith and the corresponding computer readable form are both incorporated herein by reference in their entireties.

What is claimed is:

1. An isolated nucleic acid molecule comprising a polynucleotide having a nucleotide sequence at least 95% identical to a sequence selected from the group consisting of:
(a) a polynucleotide fragment of SEQ ID NO:X or a polynucleotide fragment of the cDNA sequence included in ATCC Deposit No:Z, which is hybridizable to SEQ ID NO:X;
(b) a polynucleotide encoding a polypeptide fragment of SEQ ID NO:Y or a polypeptide fragment encoded by the cDNA sequence included in ATCC Deposit No:Z, which is hybridizable to SEQ ID NO:X;
(c) a polynucleotide encoding a polypeptide domain of SEQ ID NO:Y or a polypeptide domain encoded by the cDNA sequence included in ATCC Deposit No:Z, which is hybridizable to SEQ ID NO:X;
(d) a polynucleotide encoding a polypeptide epitope of SEQ ID NO:Y or a polypeptide epitope encoded by the cDNA sequence included in ATCC Deposit No:Z, which is hybridizable to SEQ ID NO:X;
(e) a polynucleotide encoding a polypeptide of SEQ ID NO:Y or the cDNA sequence included in ATCC Deposit No:Z, which is hybridizable to SEQ ID NO:X, having biological activity;
(f) a polynucleotide which is a variant of SEQ ID NO:X;
(g) a polynucleotide which is an allelic variant of SEQ ID NO:X;
(h) a polynucleotide which encodes a species homologue of the SEQ ID NO:Y;
(i) a polynucleotide capable of hybridizing under stringent conditions to any one of the polynucleotides specified in (a)-(h), wherein said polynucleotide does not hybridize under stringent conditions to a nucleic acid molecule having a nucleotide sequence of only A residues or of only T residues.

2. The isolated nucleic acid molecule of claim 1, wherein the polynucleotide fragment comprises a nucleotide sequence encoding a secreted protein.

3. The isolated nucleic acid molecule of claim 1, wherein the polynucleotide fragment comprises a nucleotide sequence encoding the sequence identified as SEQ ID NO:Y or the polypeptide encoded by the cDNA sequence included in ATCC Deposit No:Z, which is hybridizable to SEQ ID NO:X.

4. The isolated nucleic acid molecule of claim 1, wherein the polynucleotide fragment comprises the entire nucleoticle sequence of SEQ ID NO:X or the cDNA sequence included in ATCC Deposit No:Z, which is hybridizable to SEQ ID NO:X.

5. The isolated nucleic acid molecule of claim 2, wherein the nucleotide sequence comprises sequential nucleotide deletions from either the C-terminus or the N-terminus.

6. The isolated nucleic acid molecule of claim 3, wherein the nucleotide sequence comprises sequential nucleotide deletions from either the C-terminus or the N-terminus.

7. A recombinant vector comprising the isolated nucleic acid molecule of claim 1.

8. A method of making a recombinant host cell comprising the isolated nucleic acid molecule of claim 1.

9. A recombinant host cell produced by the method of claim 8.

10. The recombinant host cell of claim 9 comprising vector sequences.

11. An isolated polypeptide comprising an amino acid sequence at least 95% identical to a sequence selected from the group consisting of:
(a) a polypeptide fragment of SEQ ID NO:Y or the encoded sequence included in ATCC Deposit No:Z;
(b) a polypeptide fragment of SEQ ID NO:Y or the encoded sequence included in ATCC Deposit No:Z, having biological activity;
(c) a polypeptide domain of SEQ ID NO:Y or the encoded sequence included in ATCC Deposit No:Z;
(d) a polypeptide epitope of SEQ ID NO:Y or the encoded sequence included in ATCC Deposit No:Z;
(e) a secreted form of SEQ ID NO:Y or the encoded sequence included in ATCC Deposit No:Z;
(f) a full length protein of SEQ ID NO:Y or the encoded sequence included in ATCC Deposit No:Z;
(g) a variant of SEQ ID NO:Y;
(h) an allelic variant of SEQ ID NO:Y; or
(i) a species homologue of the SEQ ID NO:Y.

12. The isolated polypeptide of claim 11, wherein the secreted form or the full length protein comprises sequential amino acid deletions from either the C-terminus or the N-terminus.

13. An isolated antibody that binds specifically to the isolated polypeptide of claim 11.

14. A recombinant host cell that expresses the isolated polypeptide of claim 11.

15. A method of making an isolated polypeptide comprising:
(a) culturing the recombinant host cell of claim 14 under conditions such that said polypeptide is expressed; and
(b) recovering said polypeptide.

16. The polypeptide produced by claim 15.

17. A method for preventing, treating, or ameliorating a medical condition, comprising administering to a mammalian subject a therapeutically effective amount of the polynucleotide of claim 1.

18. A method of diagnosing a pathological condition or a susceptibility to a pathological condition in a subject comprising:
(a) determining the presence or absence of a mutation in the polynucleotide of claim 1; and
(b) diagnosing a pathological condition or a susceptibility to a pathological condition based on the presence or absence of said mutation.

19. A method of diagnosing a pathological condition or a susceptibility to a pathological condition in a subject comprising:
(a) determining the presence or amount of expression of the polypeptide of claim 11 in a biological sample; and
(b) diagnosing a pathological condition or a susceptibility to a pathological condition based on the presence or amount of expression of the polypeptide.

20. A method for identifying a binding partner to the polypeptide of claim 11 comprising:
(a) contacting the polypeptide of claim 11 with a binding partner; and
(b) determining whether the binding partner effects an activity of the polypeptide.

21. The gene corresponding to the cDNA sequence of SEQ ID NO:X.

22. A method of identifying an activity in a biological assay, wherein the method comprises:
(a) expressing SEQ ID NO:X in a cell;
(b) isolating the supernatant;
(c) detecting an activity in a biological assay; and
(d) identifying the protein in the supernatant having the activity.

23. The product produced by the method of claim 20.

24. A method for preventing, treating, or ameliorating a medical condition, comprising administering to a mammalian subject a therapeutically effective amount of the polypeptide of claim 11.

25. An isolated protein comprising amino acid residues 23 to 553 of SEQ ID NO: 149.

26. The isolated protein of claim 25 which comprises amino acid residues 2 to 553 of SEQ ID NO: 149.

27. The isolated protein of claim 25 which comprises amino acid residues 1 to 553 of SEQ ID NO: 149.

28. The protein of claim 25 which further comprises a polypeptide sequence heterologous to SEQ ID NO: 149.

29. A composition comprising the protein of claim 25 and a pharmaceutically acceptable carrier.

30. An isolated protein produced by the method comprising:
(a) expressing the protein of claim 25 by a cell; and
(b) recovering said protein.

31. An isolated protein comprising the amino acid sequence of the secreted portion of the polypeptide encoded by the HKABT24 cDNA contained in ATCC Deposit No. 209463.

32. The isolated protein of claim 31 which comprises the amino acid sequence of the complete polypeptide encoded by the HKABT24 cDNA contained in ATCC Deposit No. 209463, excepting the N-terminal methionine.

33. The isolated protein of claim 31 which comprises the amino acid sequence of the complete polypeptide encoded by the HKABT24 cDNA contained in ATCC Deposit No. 209463.

34. The protein of claim 31 which further comprises a polypeptide sequence heterologous to SEQ ID NO: 149.

35. A composition comprising the protein of claim 31 and a pharmaceutically acceptable carrier.

36. An isolated protein produced by the method comprising:
(a) expressing the protein of claim 31 by a cell; and
(b) recovering said protein.

37. An isolated first polypeptide at least 90% identical to a second polypeptide consisting of amino acid residues 23 to 553 of SEQ ID NO: 149.

38. The isolated polypeptide of claim 37, wherein said first polypeptide is at least 95% identical to said second polypeptide.

39. The protein of claim 37 which further comprises a polypeptide sequence heterologous to SEQ ID NO: 149.

40. A composition comprising the protein of claim 37 and a pharmaceutically acceptable carrier.

41. An isolated protein produced by the method comprising:
(a) expressing the protein of claim 37 by a cell; and
(b) recovering said protein.

42. An isolated first polypeptide at least 90% identical to a second polypeptide consisting of the secreted portion of the polypeptide encoded by the HKABT24 CDNA contained in ATCC Deposit No. 209463.

43. The isolated polypeptide of claim 42, wherein said first polypeptide is at least 95% identical to the said second polypeptide.

44. The protein of claim 42 which further comprises a polypeptide sequence heterologous to SEQ ID NO:149.

45. A composition comprising the protein of claim 42 and a pharmaceutically acceptable carrier.

46. An isolated protein produced by the method comprising:
(a) expressing the protein of claim 42 by a cell; and
(b) recovering said protein.

47. An isolated first polypeptide at least 90% identical to a second polypeptide consisting of amino acid residues 1 to 553 of SEQ ID NO: 149.

48. The isolated polypeptide of claim 47, wherein said first polypeptide is at least 95% identical to said second polypeptide.

49. The protein of claim 47 which comprises a heterologous polypeptide sequence.

50. A composition comprising the protein of claim 47 and a pharmaceutically acceptable carrier.

51. An isolated protein produced by the method comprising:
(a) expressing the protein of claim 47 by a cell; and
(b) recovering said protein.

52. An isolated first polypeptide at least 90% identical to a second polypeptide consisting of the complete polypeptide encoded by the HKABT24 cDNA contained in ATCC Deposit No. 209463.

53. The isolated polypeptide of claim 52, wherein said first polypeptide is at least 95% identical to said second polypeptide.

54. The protein of claim 52 which further comprises a polypeptide sequence heterologous to SEQ ID NO: 149.

55. A composition comprising the protein of claim 52 and a pharmaceutically acceptable carrier.

56. An isolated protein produced by the method comprising:
(a) expressing the protein of claim 52 by a cell; and
recovering said protein.

57. An isolated protein consisting of at least 30 contiguous amino acid residues of amino acid residues 23 to 553 of SEQ ID NO: 149.

58. The isolated protein of claim 57 which consists of at least 50 contiguous amino acid residues of amino acid residues 23 to 553 of SEQ ID NO: 149.

59. The protein of claim 57 which further comprises a polypeptide sequence heterologous to SEQ ID NO: 149.

60. A composition comprising the protein of claim 57 and a pharmaceutically acceptable carrier.

61. An isolated protein produced by the method comprising:
(a) expressing the protein of claim 57 by a cell; and
(b) recovering said protein.

62. An isolated protein consisting of at least 30 contiguous amino acid residues of the secreted portion of the polypeptide encoded by the HKABT24 cDNA contained in ATCC Deposit No. 209463.

63. The isolated protein of claim 62 which consists of at least 50 contiguous amino acid residues of the secreted portion of the polypeptide encoded by the HKABT24 cDNA contained in ATCC Deposit No. 209463.

64. The protein of claim 62 which further comprises a polypeptide sequence heterologous to SEQ ID NO: 149.

65. A composition comprising the protein of claim 62 and pharmaceutically acceptable carrier.

66. An isolated protein produced by the method comprising:
(a) expressing the protein of claim 62 by a cell; and
(b) recovering said protein.

67. An isolated protein consisting of at least 30 contiguous amino acid residues of amino acid residues I to 553 of SEQ ID NO: 149.

68. The isolated protein of claim 67 which consists of at least 50 contiguous amino acid residues of amino acid residues 1 to 553 of SEQ ID NO: 149.

69. The protein of claim 67 which further comprises a polypeptide sequence heterologous to SEQ ID NO: 149.

70. A composition comprising the protein of claim 67 and a pharmaceutically acceptable carrier.

71. An isolated protein produced by the method comprising:
(a) expressing the protein of claim 67 by a cell; and
(b) recovering said protein.

72. An isolated protein consisting of at least 30 contiguous amino acid residues of the complete polypeptide encoded by the HKABT24 cDNA contained in ATCC Deposit No. 209463.

73. The isolated protein of claim 72 which consists of at least 50 contiguous amino acid residues of the complete polypeptide encoded by the HKABT24 cDNA contained in ATCC Deposit No. 209463.

74. The protein of claim 72 which further comprises a polypeptide sequence heterologous to SEQ ID NO: 149.

75. A composition comprising the protein of claim 72 and pharmaceutically acceptable carrier.

76. An isolated protein produced by the method comprising:
(a) expressing the protein of claim 72 by a cell; and
(b) recovering said protein.

The application's sequence listing, which the Patent Office published only in electronic form, follows.

SEQUENCE LISTING (672 sequences)

SEQ ID NO: 1 - DNA, 733 bp, Homo sapiens
gggatccggagcccaaatcttctgacaaaactcacacatgcccaccgtgcccagcacctgaattcgagggtgcaccgtcagtcttcctcttccccccaaaacccaaggacaccctcatgatctcccggactcctgaggtcacatgcgtggtggtggacgtaagccacgaagaccctgaggtcaagttcaactggtacgtggacggcgtggaggtgcataatgccaagacaaagccgcgggaggagcagtacaacagcacgtaccgtgtggtcagcgtcctcaccgtcctgcaccaggactggctgaatggcaaggagtacaagtgcaaggtctccaacaaagccctcccaacccccatcgagaaaaccatctccaaagccaaagggcagccccgagaaccacaggtgtacaccctgcccccatcccgggatgagctgaccaagaaccaggtcagcctgacctgcctggtcaaaggcttctatccaagcgacatcgccgtggagtgggagagcaatgggcagccggagaacaactacaagaccacgcctcccgtgctggactccgacggctccttcttcctctacagcaagctcaccgtggacaagagcaggtggcagcaggggaacgtcttctcatgctccgtgatgcatgaggctctgcacaaccactacacgcagaagagcctctccctgtctccgggtaaatgagtgcgacggccgcgactctagaggat

SEQ ID NO: 2 - protein, 5 aa, Homo sapiens
  Site (3): Xaa equals any of the twenty naturally ocurring L-amino acids
WSXWS

SEQ ID NO: 3 - DNA, 86 bp, Homo sapiens
gcgcctcgagatttccccgaaatctagatttccccgaaatgatttccccgaaatgatttccccgaaatatctgccatctcaattag

SEQ ID NO: 4 - DNA, 27 bp, Homo sapiens
gcggcaagctttttgcaaagcctaggc

SEQ ID NO: 5 - DNA, 271 bp, Homo sapiens
ctcgagatttccccgaaatctagatttccccgaaatgatttccccgaaatgatttccccgaaatatctgccatctcaattagtcagcaaccatagtcccgcccctaactccgcccatcccgcccctaactccgcccagttccgcccattctccgccccatggctgactaattttttttatttatgcagaggccgaggccgcctcggcctctgagctattccagaagtagtgaggaggcttttttggaggcctaggcttttgcaaaaagctt

SEQ ID NO: 6 - DNA, 32 bp, Homo sapiens
gcgctcgagggatgacagcgatagaaccccgg

SEQ ID NO: 7 - DNA, 31 bp, Homo sapiens
gcgaagcttcgcgactccccggatccgcctc

SEQ ID NO: 8 - DNA, 12 bp, Homo sapiens
ggggactttccc

SEQ ID NO: 9 - DNA, 73 bp, Homo sapiens
gcggcctcgaggggactttcccggggactttccggggactttccgggactttccatcctgccatctcaattag

SEQ ID NO: 10 - DNA, 256 bp, Homo sapiens
ctcgaggggactttcccggggactttccggggactttccgggactttccatctgccatctcaattagtcagcaaccatagtcccgcccctaactccgcccatcccgcccctaactccgcccagttccgcccattctccgccccatggctgactaattttttttatttatgcagaggccgaggccgcctcggcctctgagctattccagaagtagtgaggaggcttttttggaggcctaggcttttgcaaaaagctt

SEQ ID NO: 11 - DNA, 859 bp, Homo sapiens
  SITE (27): n equals a,t,g, or c
ccgggtcgacccacgcgtccggcagangcgggactgtcgtctgggggagccgcccaggaggctcctcaggccgaccccagaccctggctggccaggatgaagtatctccggcaccggcggcccaatgccaccctcattctggccatcggcgctttcaccctcctcctcttcagtctgctagtgtcaccacccacctgcaaggtccaggagcagccaccggcgatccccgaggccctggcctggcccactccacccacccgcccagccccggccccgtgccatgccaacacctctatggtcacccacccggacttcgccacgcagccgcagcacgttcagaacttcctcctgtacagacactgccgccactttcccctgctgcaggacgtgcccccctctaagtgcgcgcagccggtcttcctgctgctggtgatcaagtcctcccctagcaactatgtgcgccgcgagctgctgcggcgcacgtggggccgcgagcgcaaggtacggggtttgcagctgcgcctcctcttcctggtgggcacagcctccaacccgcacgaggcccgcaaggtcaaccggctgctggagctggaggcacagactcacggagacatcctgcagtgggacttccacgactccttcttcaacctcacgctcaagcaggtgcgctggactggggtcacctgatcggggccacctgtccttcttgtccaaattaccactccactccagcctgggcaacaaaagcgaaaactccatctccaaaaaaataataataataataataaaataaaaatcacacaaaggccaaaaaaaaaaaaaaaaaaaaaaaaaaaaaaaaaaaaaaaaaaaaaaaaaa

SEQ ID NO: 12 - DNA, 1129 bp, Homo sapiens
gctgcttcccaaggaccatgaaactcctgctgctggctcttcctatgcttgtgctcctaccccaagtgatcccagcctatagtggtgaaaaaaaatgctggaacagatcagggcactgcaggaaacaatgcaaagatggagaagcagtgaaagatacatgcaaaaatcttcgagcttgctgcattccatccaatgaagaccacaggcgagttcctgcgacatctcccacacccttgagtgactcaacaccaggaattattgatgatattttaacagtaaggttcacgacagactactttgaagtaagcagcaagaaagatatggttgaagagtctgaggcgggaaggggaactgagacctctcttccaaatgttcaccatagctcatgacttcctctcggctatcactcacccctgtcctcagagtgataaactaagtcacatacagataaagcactgaaaacaccacagtgaccctcccaccccccaccaatatgtaattctattaatagaaacagctgtgtaaagaagtctaaaattttcactatttccaatgataaactcttcagtgctcttcttgaaatgtcacattatttcccaacaagttatacctatttttagtattcttgttgctagtgccatgcacaacttcaatagctagttgctattccaacaacaatttcttcatgtatcgttctgtcttctcaacagctgtctttcatggcagcataagtggtcatgatcaaaattctaaatcttgcatctgtgagagtagctactatgacactaaaagctttttttctagaacaggagacacttcaggtgaagcattcattctcctactaactatggccttggagccaggttttatctctcactgtaggaaattggccgccccaggtgtgagctatgaagactcctttttgccccagtggctttggggttgaaatgctgtcgaaaagcttttatggctctgtagacccatctttttgaccaagccttgatcacacatggacatccaagggtaatcatggacccccaattgtgggtgaaaggatggatcatttatctacctgattactgagagctttatttgtctccctctgatagcaaaaaaaaaaaaaaaaaaa

SEQ ID NO: 13 - DNA, 1271 bp, Homo sapiens
ggggctgggccctgctcaggtggctctctccttgcagggaccggcgatgctctgcaggctgtgctggctggtctcgtacagcttggctgtgctgttgctcggctgcctgctcttcctgaggaaggcggccaagcccgcagagaccccacggcccaccagcctttctggggctcccccaacaccccgtcacagccggtgtccacccaaccacacagtgtctagcgcctctctgtccctgcctagccgtcaccgtctcttcttgacctatcgtcactgccgaaatttctctatcttgctggagccttcaggctgttccaaggataccttcttgctcctggccatcaagtcacagcctggtcacgtggagcgacgtgcggctatccgcagcacgtggggcaggtggggggatgggctagggccggcactgaagctggtgttcctcctaggggtggcaggatccgctcccccagcccagctgctggcctatgagagtagggagtttgatgacatcctccagtgggacttcactgaggacttcttcaacctgacgctcaaggagctgcacctgcagcgctgggtggtggctgcctgcccccaggcccatttcatgctaaagggagatgacgatgtctttgtccacgtccccaacgtgttagagttcctggatggctgggacccagcccaggacctcctggtgggagatgtcatccgccaagccctgcccaacaggaacactaaggtcaaatacttcatcccaccctcaatgtacagggccacccactacccaccctatgctggtgggggaggatatgtcatgtccagagccacagtgcggcgcctccaggctatcatggaagatgctgaactcttccccattgatgatgtctttgtgggtatgtgcctgaggaggctggggctgagccctatgcaccatgctggcttcaagacatttggaatccggcggcccctggaccccttagacccctgcctgtatagggggctcctgctggttcaccgcctcagccccctcgagatgtggaccatgtgggcactggtgacagatgaggggctcaagtgtgcagctggccccataccccagcgctgaagggtgggttgggcaacagcctgagagtggactcagtgttgattctctatcgtgatgcgaaattgatgcctgctgctctacagaaaatgccaacttggttttttaactcctctcaccctgttagctctgattaaaaacactgcaacccaaaaaaaaaaaaaaaaaa

SEQ ID NO: 14 - DNA, 913 bp, Homo sapiens
ggcacgagttagtgtcctgaaacgcctatgacagtgcctggcccagggttgggcacttactcatgttattcacttattcatatgtgggaatgaacagttcagccagtataaaggacaggtgagtacacaccaaggagatcttcagggagagatcagctggttttcctgtgaagatgtcagcttcatccctccaccgtctccctgtgctcatggctctgttccctttccaggctgctgctgctggttctttgggtctgcagccacctcccacccccatgaagggcaaacccagcattatgttacctcctcagtataaaaggagagagggtctcaaaaaaaaaaaaaaaaaaatccaaaaagttgctcttgtcagctttgggagggcagactccatagttggagatgggcttccaaccaaccaaggagataaatgccagagggagcgaaccatgccaggctcaaagcacatctctccccaaactccccaggtggggaagcaggccagaggctccacaaacccctcagggaggcctggagtccagatgctgtactccagtatctaaacaatcactgaatcttaaagctgacaggttcaaagctcttactttgggccgagcgcagtggcttacgcctgtaatccaggcactttcggagctgaggtgggtggatcacctgaggtcaggagtttgagaccaacctagccaacatggtgaaaacccatctctactaaaaatacaaaaattagctgggcgtgttgacacgtgcctgtaatcccagctactcggtaggctgaggcagaagaatcgcttgaacccaggaggcagaggttgcagtgagctgagatcatgccactgcactccagcgtgggtgacagagtgagactcccgtcttgggaaaaaaaaaaaaaaaaaaa

SEQ ID NO: 15 - DNA, 2674 bp, Homo sapiens
  SITE (2607): n equals a,t,g, or c
  SITE (2611): n equals a,t,g, or c
  SITE (2621): n equals a,t,g, or c
  SITE (2634): n equals a,t,g, or c
  SITE (2650): n equals a,t,g, or c
  SITE (2660): n equals a,t,g, or c
  SITE (2669): n equals a,t,g, or c
gatccctcccatctcacagtacctcacaggtctcttcccccgagcagtgcattgctggagcgaggagaagctcacgaatcagctgcaggtctctgttttgaaaaagcagagatacagaggcagaggaaaagggtggactcctatgtgacctgttcttagagcaagacaatcaccatctgaattccagaagccctgttcatggttggggatattttctcgactgcatggaatcagaaagaagcaaaaggatgggaaatgcctgcattcccctgaaaagaattgcttatttcctatgtctcttatctgcgcttttgctgactgaggggaagaaaccagcgaagccaaaatgccctgccgtgtgtacttgtaccaaagataatgctttatgtgagaatgccagatccattccacgcaccgttcctcctgatgttatctcattatcctttgtgagatctggttttactgaaatctcagaagggagttttttattcacgccatcgctgcagctcttgttattcacatcgaactcctttgatgtgatcagtgatgatgcttttattggtcttccacatctagagtatttattcatagaaaacaacaacatcaagtcaatttcaagacatactttccggggactaaagkcattaattcacttgagccttgcaaacaacaatctccagacactcccaaaagatattttcaaaggcctggattctttaacaaatgtggacctgaggggtaattcatttaattgtgactgtaaactgaaatggctagtggaatggcttggscacaccaatgcaactgttgaagacatctactgcgaaggccccccagaatacaagaagcgcaaaatcaatagtctctcctcgaaggatttcgattgcatcattacagaatttgcaaagtctcaagacctgccttatcaatcattgtccatagacactttttcttatttgaatgatgagtatgtagtcatcgctcagccttttactggaaaatgcattttccttgaatgggaccatgtggaaaagaccttccggaattatgacaacattacaggcacatccactgtagtatgcaagcctatagtcattgaaactcagctctatgttattgtggcccagctgtttggtggctctcacatctataagcgagacagttttgcaaataaattcataaaaatccaggatattgaaattctcaaaatccgaaaacccaatgacattgaaacattcaagattgaaaacaactggtactttgttgttgctgacagttcaaaagctggttttactaccatttacaaatggaacggaaacggattctactcccatcaatccttacacgcgtggtacagggacactgatgtggaatatctagaaatagtcagaacacctcagacactcagaacgcctcatttaattctgtctagtagttcccascgtcctgtaatttatcagtggaacaaagcaacacaattattcactaaccaaactgacattcctaacatggaggatgtgtacgcagtgaagcacttctcagtgaaaggggacgtgtacatttgcttgacaagattcattggtgattccaaagtcatgaaatggggaggctcctcgttccaggatattcagaggatgccatcgcgaggatccatggtgttccagcctcttcaaataaataattaccaatatgcaattcttggaagtgattactcctttactcaagtgtataactgggatgcagagaaagccaaatttgtgaaatttcaggaattaaatgttcaggcaccaagatcattcacacatgtgtccattaataagcgtaattttctttttgcttccagttttaagggaaatacacagatttacaaacatgtcatagttgacttaagcgcatgagacaccaaattctgtggctgccatcagaaattttctacagtacatgacccggatgaactcaatgcatgatgactcttcttatcacacttgcaaatgaatgcctttcaaacattgagactgctagaaccaagcactaccagtatctccatccttaactgtccagtccagtgatgtgggaagttaccttttataagacaaaatttaattgtgtaactgttctttgcagtgaagatgtgtaaataagcgtttaatggtatctgttactccaaaaagaaatattaatatgtacttttccatttatttattcatgtgtacagaaacaactgccaaataaaatgtttacattttctttcataaaaaaaaaaaaaaaaaaactcgagggggggcccggtacccaattcgccctatagtgagtcgtattacaattcactggccgtcgttttacaacgtcgtgactgggaaaaccctggcgttacccaacttaatcgccttgcagcacatccccctttcgccagctggcgtaatagcgaagaggccgcaccgatcgcccttcccaacagttgcgcagcctgaatggcgaatggcaaattgtaagcgttaatattttgttaaaattccgcgttaaattttgttaaatcagctcattttttaacccaataggccgaaattcggcaaaaatcccttattaatcaaaagaaatagaaccganaatnggggttgaantgttgtttccaantttgggaaacaaaaantcccacttantttaaaagnaaacg

SEQ ID NO: 16 - DNA, 1636 bp, Homo sapiens
  SITE (1624): n equals a,t,g, or c
tcgacccacgcgtccggctgagtgtgagctgagcctgccccaccaccaagatgatcctgagcttgctgttcagccttgggggccccctgggctgggggctgctgggggcatgggcccaggcttccagtactagcctctctgatctgcagagctccaggacacctggggtctggaaggcagaggctgaggacaccagcaaggaccccgttggacgtaactggtgcccctacccaatgtccaagctggtcaccttactagctctttgcaaaacagagaaattcctcatccactcgcagcagccgtgtccgcagggagctccagactgccagaaagtcaaagtcatgtaccgcatggcccacaagccagtgtaccaggtcaagcagaaggtgctgacctctttggcctggaggtgctgccctggctacacgggccccaactgcgagcaccacgattccatggcaatccctgagcctgcagatcctggtgacagccaccaggaacctcaggatggaccagtcagcttcaaacctggccaccttgctgcagtgatcaatgaggttgaggtgcaacaggaacagcaggaacatctgctgggagatctccagaatgatgtgcaccgggtggcagacagcctgccaggcctgtggaaagccctgcctggtaacctcacagctgcagtgatggaagcaaatcaaacagggcacgaattccctgatagatccttggagcaggtgctgctaccccacgtggacaccttcctacaagtgcatttcagccccatctggaggagctttaaccaaagcctgcacagccttacccaggccataagaaacctgtctcttgacgtggaggccaaccgccaggccatctccagagtccaggacagtgccgtggccagggctgacttccaggagcttggtgccaaatttgaggccaaggtccaggagaacactcagagagtgggtcagctgcgacaggacgtggaggaacgcctgcacgcccagcactttaccctgcaccgctcgatctcagagctccaagccgatgtggacaccaaattgaagaggctgcacaaggctcakgaggccccagggaccaatggcagtctggtgttggcaacgcctggggctggggcaaggcctgagccggacagcctgcaggccaggctgggccagctgcagaggaacctctcagagctgcacatgaccacggcccgcagggaggaggagttgcagtacaccctggaggacatgagggccaccctgacccggcacgtggatgagatcaaggaactgymctccgaatcggacgagactttcgatcagattagcaagktgkwgcggcaggtggaggagctgcaggtgaaccacacggcgctccgtgagctgcgcgtgatcctgatggagaagtctctgatcatggaggagaacaaggaggaggtggagcggcagctcctggagctcaacctcacgctgcagcacctgcagggtggcatgccgacctcatcaagtacgtgaaggactgcaattgccagaagctctatttagacctggacgtcatccgggagggcagagggacgccacgcgtgccctggaggagacccaggtgagcctggacgarcggnggcaagctggac

SEQ ID NO: 17 - DNA, 1432 bp, Homo sapiens
acgagagatttaagtgcagcgtggattttttttttctcactttgccttgtgttttccactccgaaagaatgttgtggctgctcttttttctggtgactgccattcatgctgaactctgtcaaccaggtgcagaaaatgcttttaaagtgagacttagtatcagaacagctctgggagataaagcatatgcctgggataccaatgaagaatacctcttcaaagcgatggtagctttctccatgagaaaagttcccaacagagaagcaacagaaatttcccatgtcctactttgcaatgtaacccagagggtatcattctggtttgtggttacagacccttcaaaaaatcacacccttcctgctgttgaggtgcaatcagccataagaatgaacaagaaccggatcaacaatgccttctttctaaatgaccaaactctggaatttttaaaaatcccttccacacttgcaccacccatggacccatctgtgcccatctggattattatatttggtgtgatattttgcatcatcatagttgcaattgcactactgattttatcagggatctggcaacgtagaagaaagaacaaagaaccatctgaagtggatgacgctgaagataagtgtgaaaacatgatcacaattgaaaatggcatcccctctgatcccctggacatgaagggagggcatattaatgatgccttcatgacagaggatgagaggctcacccctctctgaagggctgttgttctgcttcctcaagaaattaaacatttgtttctgtgtgactgctgagcatcctgaaataccaagagcagatcatatattttgtttcaccattcttcttttgtaataaattttgaatgtgcttgaaagtgaaaagcaatcaattatacccaccaacaccactgaaatcataagctattcacgactcaaaatattctaaaatatttttctgacagtatagtgtataaatgtggtcatgtggtatttgtagttattgatttaagcatttttagaaataagatcaggcatatgtatatattttcacacttcaaagacctaaggaaaaataaattttccagtggagaatacatataatatggtgtagaaatcattgaaaatggatcctttttgacgatcacttatatcactctgtatatgactaagtaaacaaaagtgagaagtaattattgtaaatggatggataaaaatggaattactcatatacagggtggaattttatcctgttatcacaccaacagttgattatatattttctgaatatcagcccctaataggacaattctatttgttgaccatttctacaatttgtaaaagtccaatctgtgctaacttaataaagtaataatcatctctttttgattgtgaaaaaaaaaaaaaaaaaaaaaaaaaaaaaaaaaaaaaaaaaa

SEQ ID NO: 18 - DNA, 1547 bp, Homo sapiens
ggcacgagcggctgcgggcgcgaggtgaggggcgcgaggttcccagcaggatgccccggctctgcaggaagctgaagtgagaggcccggagagggcccagcccgcccggggcaggatgaccaaggcccggctgttccggctgtggctggtgctggggtcggtgttcatgatcctgctgatcatcgtgtactgggacagcgcagcgccgcgcacttctacttgcacacgtccttctctaggccgcacacggggccgccgctgcccacgcccgggccggacaggacagggagctcacggccgactccgatgtcgacgagtttctggacaatttctcatgctggcgtgaagcagagtgaccttcccagaaaggagacggagcagccgcctgcgccgggggagcatggaggagagcgtgagaggctacgactggtccccgcgcgacgcccggcgcagcccagaccagggccggcagcaggcggagcggaggaacgtgctgcggggcttctgcgccaactccagcctggccttccccaccaaggagcgcgcattcgacgacatccccaactcggagctgagccacctgatcgtggacgaccggcacggggccatctactgctacgtgcccaaggtggcctgcaccaactggaagcgcgtgatgatcgtgctgagcggaagcctgctgcaccgcggtgcgccctaccgcgacccgctgcgcatcccgcgcgagcacgtgcacaacgccagcgcgcacctgaccttcaacaagttctggcgccgctacgggaagctctcccgccacctcatgaaggtcaagctcaagaagtacaccaagttcctcttcgtgcgcgaccccttcgtgcgcctgatctccgccttccgcagcaagttcgagctggagaacgaggagttctaccgcaagttcgccgtgcccatgctgcgggtgtacgccaaccacaccagcctgcccgcctcggcgcgcgaggccttccgcgctggcctcaaggtgtccttcgccaacttcatccagtacctgctggacccgcacacggagaagctggcgcccttcaacgagcactggcggcaggtgtaccgcctctgccacccgtgccagatcgactacgattcctggggaagctggagactctggacgaggacgccgcgcagctgctgcagctactccaggtggaccggcagtccgcttccccccgagctaccggaacaggaccgccagcagctgggaggaggactggttcgccaagatccccctggcctggaggcagcagctgtataaactctacgaggccgactttgttctcttcggctaccccaagcccgaaaacctcctccgagactgaaagctttcgcgttgctttttctcgcgtgcctggaacctgacgcacgcgcactccagtttttttatgacctacgattttgcaatctgggcttcttgttcactccactgcctctatccattgagtactgtatcgatattgttttttaagattaatatatttcaggtatttaatacgaaaaaaaaaaaaaaaaaa

SEQ ID NO: 19 - DNA, 1338 bp, Homo sapiens
cccacgcgtccggttcccccatctgtctctcaggagcgagatctgatcgctgaatttgcccaagtcacaaattggtccagctgctgcttgcgtgtctttgcatggcacccccacaccaacaagtttgcagtggccctgctagatgactcagtccgtgtgtataatgccagcagcaccatagtcccctccctgaagcaccggctgcagcgaaatgtggcgtctctggcctggaagccccttagtgcctctgtcttggctgtggcctgccagagctgcattcttatctggaccctggaccctacctccttgtctacccgaccctcttctggctgtgcccaagtgctgtctcaccctgggcatacacctgttaccagcttggcctgggcccccagtggggggcggctgctctcagcttcaccgtggatgctgctatccgggtatgggatgtctcaacagagacctgtgtcccccttccctggtttcgaggaggtggggtgaccaactgctctggtccccagacggcagcaaaatcctggctaccactccttcagctgtctttcgagtctgggaggcccagatgtggacttgtgagaggtggcctactctatcagggcgctgtcagactggctgctggagcccagatggcagccgactgctgttcactgtattgggagagccactgatttactccctgtcttttccagaacgttgtggtgagggaaaggggtgcgttggaggtgcaaagtcagcaacgattgtggcagatctgtctgagacaacaatacagacaccagatggtgaggagaggcttgggggagaggctcactccatggtctgggaccccagtggggaacgtctggctgtgcttatgaaaggaaagccaagggtacaggatggtaaaccagtcatcctcctttttcgcactcgaaacagccctgtgtttgagctccttccctgtggcattatccagggggagccaggagcccagccccagctcatcactttccatcttccttcaacaaaggggccctgctcagtgtgggctggtccacaggccgaattgcccacatcccgctgtactttgtcaatgcccagtttccacgttttagcccagtgcttgggcgggcccaggaaccccctgctgggggtggaggctctattcatgacctgcccctctttactgagacatccccaacctctgccccttgggaccctctcccagggccaccacctgttctgccccactccccacattcccacctctaagaataaataagttttccttttgttttccaaaaaaaaaaaaaaaaaaaaaaaaaaaaaaaaaaaaaaaaaaaa

SEQ ID NO: 20 - DNA, 2071 bp, Homo sapiens
cggcacgagccaaaacaaaaattttgtgcagtcctgtcatttaatcatcttatcagtgccccaaggtgacttttttcaagagctctgttgataccatgtgtgtgtgttattttctggtgtttttacagatttgggccaggcttagtcatctattggtatggatttatccaggagctggactgcaaccgggaaaggggcatcctgctcaaagcctgtttccccacgaacattgtcaccttatgccacagcatagcttgaccctgaagatcctggaagagaagctgggaggaaaaggtgaatccggaagcaattttactttcctgcactgtaagatcctggcaacatctgccctgaacttcagctgaactcttgctgcccgtagtcacaccactacctctttagacaaacatatcaagagtttctgttttccttcatcccttgctgatgtgaacagccaagaactacagacacaacccactcattatcagcatttctgtctctgtcaaacaattagtttatagatagtcataatctttctttcttccggatggtttatccttgtatgctgaacaaaagaaaaaatgtgaagactgaaaggtgtgatttttcaattctcctcccagttaccgaatcaccctccttatttttttttccctaagcctccgttcactgtctctccctctccctttctctttccatgttgcactccacagagaacccagcattgcattaccatcgtggaataatctagcgcaaacctaggaaagctgaagccacaaagtccaaagccacctttgtactcacctgcagagctccagaagaccttgatggcagcctgcctatgctgtgtgtttgctatattcaatctttacggcttcctgacttctgtgacagtaagccaagtgcaaaaatacacttgatgagaatttcctcttttaataatgttatttgaacaccacatattttagatttatcttatttgaaagtattagttccattgtgcctggaaaccacactcctttagattgggggccgagaggcgacaacccaacattgaggagagtttatttttaaacatggctagttgtcagtatgtacgtgagctagtatttttatgagtcgagttttttaaaggcacattctgtatactgcttagtatatgcattttataccatgtaattataaaacactcgagtaagttcagcattagaaatgtttagctttgtatgaactgagtgtgccagaaataaacctggagcaatttttaaataagcaaaataaaggagatttttctatttgttcactttaatttattcacttttgtgtacttttatgtactgcaaatcagatttcagtctaaagcgaaacatcaataagttaataataaacctatcttttgggaagttgaatattaatctgtacccaaaacgtatttagtaaaatatttgcccccgccaccctgccatgctgacataacaacttttataatgttgaatagatgatatgggaaatactaataacaacaatgtaatttttgcagacagctttaacttatatacattggttgatttttttcaaaagactaaatatgtcatttatactttgtttattttctaccaaagaaggtttgtaaaaatatgcctgctgcttttccttttgaaggacacaaacctggtcccaacatgtgtggattttaactctgagtggggtgcattaaatcaaaagagagaggcagaagatgaaatgctaaagaagggtcaggcaaacttctgtttcagtataaaattcatcatgcaggcttctgagtgaaatagaatgatttgaaaccactactgtattgcctggatacacacacacacacacacacacacacactttatacaaaaatgttaaaagcaggtttcctggcatgttctaaactgttttttctttaggaataaattacatttatctgcacagatgttgaaaatcctgttaaacccttgtcaaggatttgtttattttacattaaacaaatttattatgatgaacgtgaacaaataaattaaaaaaaaaaaaaaaaaaaaaaaaa

SEQ ID NO: 21 - DNA, 1639 bp, Homo sapiens
  SITE (12): n equals a,t,g, or c
gtgacactatanaagtacgcctggcagggtaccggtccggcaattcgcggccgcgtcgacgtcaggcgggccgtgggttcccggaggggstcttgaggcgccatttcaagtcgcccccagcctctcccacagcactcctgttttcccgggcctcatcatggcccacggccctcagtcgctgtggagcctgggcttcacagtgacactcacgtttgaactcccggtcggctgtgtgcttggtagaatttgtcatccaatacaggcgtgtaacacgggcttgatgacacccaccccacagggcccctgcaggaccgagatgatgtccaatgacaagccctggcttccagccaatgctcctgcccacatctctctcccaggagccaggcttacctctacctgtgcacctgggctgtgactcatgactggaatgatctggctgggcctgttcccccaccagacttattttcaggcgccccagcagccaccaaacatctgtcaactgaagtaatgaacctgcagttgagaggcagctaaacctaggttgaaggttagggagacagctgagttgaggtcaaatccccccggccagttagcctttctgagcctatttcctcaattgtaaaaggaagacaatcatgatgctgacctcagaatcsagcgaggaggaagtgaggaggtgcatgtgaagcattgtgcgtgactggtggggctaactgggctctggaagcggtarctctggggccctaacccctttctgcctcatgctaattgacctatggcatgtccagtgacatcatgactgaaaaaatgatttgaaartataatcgctgtcaggaattgtctcctggtctcaaactcctaggcttaaggaatttgcccaccttagcctaccaaagggcggggcttacaagcatgarccatggcacccggccccaaagtgttttttctattctctcagtcmacagttacacagaaaatttctgtgaccactggtcacgaaagggagtggaggtctctccctaccggcaaccaagcagtcgattctgcagtggacaccagctgggtgttctcttattgaattaattctgacactatctgtccagagatagcattagattccacaggttgaggacttagtccccacttgtcccttatttctgatgctgatcacaagamctargttattttgccggtgattctgactgactggctattaattagggtttctgtgacccactccttgggttcaattaatttgctagagaactccctcatggaattcagagaaacacatttaccagcttattataaaggctgctacaaaggatacagatgagatgcgcagagcaacgtgtgggatggagtgcagagcttccgcgccctctcctggagcaccactcttcaggaacctccatgtgttcagctattcagaagctccctggacccagtcctttcgggtttttatggaagcttcattatgtagacatgattaattataccattggtcattggtgatcaacttaaccttcagcccttctcccctcccggaggttggagggtggggctgaaacattccaacttacaggcccgtcgacgcggccgcgaattcccgggtcgacgagctcactagtcggcggcc

SEQ ID NO: 22 - DNA, 1860 bp, Homo sapiens
  SITE (1846): n equals a,t,g, or c
  SITE (1848): n equals a,t,g, or c
  SITE (1853): n equals a,t,g, or c
ctcaccagmsggaaagtacgagtcggctcagcctggagggacccaaccagagcctggcctgggagccagkatggccatccacaaagccttggtgatgtgcctgggactgcctctyttcctgttcccaggggcctgggcccagggccatgtcccacccggctgcagccaaggcctcaaccccctgtactacaacctgtgtgaccgctctggggcgtggggcatcgtcctggaggccgtggctggggcgggcattgtcaccacgtttgtgctcaccatcatcctggtggccagcctcccctttgtgcaggacaccaagaaacggagcctgctggggacccaggtattcttccttctggggaccctgggcctcttctgcctcgtgtttgcctgtgtggtgaagcccgacttctccacctgtgcctctcggcgcttcctctttggggttctgttcgccatctgcttctcttgtctggcggctcacgtctttgccctcaacttcctggcccggaagaaccacgggccccggggctgggtgatcttcactgtggctctgctgctgaccctggtagaggtcatcatcaatacagagtggctgatcatcaccctggttcggggcagtggcgagggcggccctcagggcaacagcagcgcaggctgggccgtggcctccccctgtgccatcgccaacatggactttgtcatggcactcatctacgtcatgctgctgctgctgggtgccttcctgggggcctggcccgccctgtgtggccgctacaagcgctggcgtaagcatggggtctttgtgctcctcaccacagccacctccgttgccatatgggtggtgtggatcgtcatgtatacttacggcaacaagcagcacaacagtcccacctgggatgaccccacgctggccatcgccctcgccgccaatgcctgggccttcgtcctcttctacgtcatccccgaggtctcccaggtgaccaagtccagcccagagcaaagctaccagggggacatgtaccccacccggggcgtgggctatgagaccatcctgaaagagcagaagggtcagagcatgttcgtggagaacaaggccttttccatggatgagccggttgcagctaagaggccggtgtcaccatacagcgggtacaatgggcagctgctgaccagtgtgtaccagcccactgagatggccctgatgcacaaagttccgtccgaagagcttacgacatcatcctcccacgggccaccgccaacagccaggtgatgggcagtgccaactcgaccctgcgggctgaagacatgtactcggcccagagccaccaggcggccacaccgccgaaagacggcaagaactctcaggtctttagaaacccctacgtgtgggactgagtcagcggtggcgaggagaggcggtcggatttggggagggccctgaggacctggccccgggcaagggactctccaggctcctcctccccctggcaggcccagcaacatgtgccccagatgtggaagggcctccctctctgccagtgtttgggtgggtgtcatgggtgtccccacccactcctcagtgtttgtggagtcgaggagccaaccccagcctcctgccaggatcacctcggcggtcacactccagccaaatagtgttctcggggtggtggctgggcagcgcctatgtttctctggagattcctgcaacctcaagagacttcccaggcgctcaggcctggatcttgctcctctgtgaggaacaagggtgcctaataaatacatttctgctttattaaaaaaaaaaaaaaaaaaaaaaactcgagggggggcccgtacccaatcgccngngatgntagtata

SEQ ID NO: 23 - DNA, 1899 bp, Homo sapiens
  SITE (1439): n equals a,t,g, or c
ccacgcgtccgcccacgcgtccgcccacgcgtccgttacgatttataaaagcaaacttttaatttttcataatatatctattcctacctaggtttttttaatcaaattaataaaatggtactcccttttgtgttattgttcagaccaaattttatcagtgtccttcaccctttattctactcacattgtttatttctatacttaataagtcctgttcactcttcctctataatatattacaaacctgatcattgtcactacaccccattcattcctggtctactacaatagccaggtctacctactttcctttcggcatttggacaatctgtgtttctggaagtagcccaaatgatctttttttgttcttatattattcagatcctattactccttgatctcaacccctacaagatattcctattatatgcttaataaaatccaatatccctaccttggcctgtatactcaataaagtccaatatccctaccttggcctacaagatcttagatgactgggatctaggaaacctattcagctaatttcctgcaattctctatgtttacctgctcaaggtttttaccactcctcaaatattcaaactggttttgcatctttttagttctatctattcttttgcagatgccaatcttagtaatcataagcagtttacctctaaattaatgctaaatattgtaaaaggtgtattataagttcagtctttcatttattctttcaaccaccaagtgtcgattgaacacatacattgggtcacaccaatcaaataagatagactcccaggcatcaccgagcatctactactcaattcatctcaggatctatacaaggggtcattttatcagaaaccaaagtcttgatgctgtccgaaaaatcacgttttcaccatgatctcctacttccctaggtggaagtataactttttaggatatatcatggttgctgacttaacttttgtattttttaaatatactcatgacaagtatcatataaaacctaaccagcaactttgcaccagcaaaagtttttcaacatttcaattcttacaaaatcaaatgatataatttcctatgtagtaaaaaattcacacatctgcaaagcttggtttcactaccacctgttaaaatcttacctttggaagctatttatgattgaaaaacactttacctcactcacaaagagctggaagtctctcttcaatccaatatgcacacagaagacaaaaagctgtatcattccttgatgatatatttgaaatcatatggccacgtctgtccattgtcttcagagtttctaagtatttcagaaaattatgacttgcactgtagaactattttaaagaaattccatggtgcaaacagaaaaactaaaacttttcatgttaggataatttattaaaaatacaaacaaatcctatgtntacataagaagatagtaactagcctttttgagagggaaatttttctctcataacttcttttctagtaatttcaataaagaataactgccattccaacgtttagcccatctcactctcttgtcttcttatggccaagtattcaagcttgaaatttgcagaggaaattcttgtccgttttttatatcatgtggtaagcctaataaaacatcttctgaaataattagcccttaaaaggatagtatcttctacctgacagaggcaaatattattgaaaagtttgtaccttataagcacattaatcatggagtcctggaactggattctgtctaagactgacttttgcttaattaagttcacagagattttccacatatttttccagaacattgcatgtagagatattgtcgatcaatcacataactagggtcagaaagatgtaacaagggagaaaaaaaaaaaa

SEQ ID NO: 24 - DNA, 1451 bp, Homo sapiens
  SITE (937): n equals a,t,g, or c
  SITE (965): n equals a,t,g, or c
  SITE (975): n equals a,t,g, or c
gccagttcactcctcggctggagacactaggtgtcctgcccctaatctcaccagagccacctcataaaccctgcaagctctgcgaagggcagctgggcacagctgaaagcccagccaccagcccatgtcctgggtgggactgggcaggaggggccacctcctactgctgatcaacccgagagccctggctgggatccgtcttccttcaccaacgggagctccggccccagggccctgcccacctctgtgcaccccacactgcagcagggagcaccctgcaggaggaactgggcaccctgcaggggtctggtggagacgaggatgctacggaggcagctgccccatgggaccagtaagagggatcttgggtgggcttccctgcagagaggaagccctcaggagacaccacagtaagccatgctggagacctggaggccaggcccgtcamctggggagctggccactaacagcgggcagagagcctcccaggacagccagcacagccccccacacgtccgagcccacctcctcatttccccgcttcccgcgttcccaagcatgggaggacctgccggacgcagcgcaccatytytcctaacagagaccaagtctgagcttcaacgcttgcgcagacgacaggcacgtgcaagcytytcytytccagcaggagagcccggagcaggacacagcgaytctttcaactgcgtcccgacaaacggtcagccccttcgctcctgcagtttatccaagctcaggaggagctttctaaagagaacacagggagacagctggctgccagagaagcagtcctggctctggaaggctccacccagctaacagggcctgtgacacaggtggcagccagcaagacccactgcagcggcatggccctcacagcctcccctgtccctgtcctgggagcagccccggcaaagantcctacccagaacaytccaggtcagganggcagggccntgargaargtgargacatcctggararctgtggccaccaaggtgctgcacggcctggaggtctccacacatctgggcaaacggaagctttctgggaggagctggctcccaggccctgctctccacgccaccccatcacagtcgcacacacagacaggctcccagattgtccaccctccacagggagaagtcagggaggtgggcaggggacggggtcagccaccggctcagcctgtgcacgcccatccctcccagcagcacccctctccggcccacctggctggcctgagtctgtggactggcactgcctgatagaactttcagtaccttcagtgcccaaagggcgcgacgactagcccttaaaagaggctggagcccctgaggaagcgggtctttaggcaaaaccaccgcacggcagagcagccacaggacagatcaatgtcttctgcgggaaaaaaaaaaaaaaaaaaactcgta

SEQ ID NO: 25 - DNA, 2317 bp, Homo sapiens
  SITE (1419): n equals a,t,g, or c
  SITE (2165): n equals a,t,g, or c
cctgcagctaccgtccgcaattcccggtcgacccacgcgtccgggcgacttgcatcgtcttcaacatgaagatagccacagtgtcagtgcttctgcccttggctctttgcctcatacaagatgctgccagtaagaatgaagatcaggaaatgtgccatgaatttcaggcatttatgaaaaakggaaaactgttctgtccccaggataagaaattttttcaaagtcttgatggaataatgttcatcaataaatgtgccacgtgcaaaatgatactggaaaaagaagcaaaatcacagaagagggccaggcatttagcaagagctcccaaggctactgccccaacagagctgaattgtgatgattttaaaaaaggagaaagagatggggattttatctgtcctgattattatgaagctgtttgtggcacagatgggaaaacatatgacaacagatgtgcactgtgtgctgagaatgcgaaaaccgggtcccaaattggtgtaaaaagtgaaggggaatgtaagagcagtaatccagagcaggatgtatgcagtgcttttcggccctttgttagagatggaagacttggatgcacaagggaaaatgatcctgttcttggtcctgatgggaagacgcatggcaataagtgtgcaatgtgtgctsagctgtyyywaaaagaagctgaaaatgccaagcgagagggtgaaactagaattcgacgaaatgctgaaaaggatttttgcaaggaatwtgaaaaacaagtgagaaatggaaggcttttttgtacacgggagagtgatccagtccgtggccctgacggcaggatgcatggcaacaaatgtgccctgtgtgctgaaattttcaagcagcgtttttcagaggaaaacagtaaaacagatcaaaatttgggaaaagctgaagaaaaaactaaagttaaaagagaaattgtgaaactctgcagtcaatatcaaaatcaggcaaagaatggaatacttttctgtaccagagaaaatgaccctattcgtggtccagatgggaaaatgcatggcaacttgtgttccatgtgtcaagcctacttccaagcagaaaatgaagaaaagaaaaaggctgaagcacgagctagaaacaaaagagaatctggaaaagcaacctcatatgcagagctttgcagtgaatatcgaaagcttgtgaggaacggaaaacttgcttgcaccagagagaacaatcctatccagggcccagatgggaaagtgcatggcaacacctgctccatgtgtgaggtcttcttccaagcagaagaagaagaaaagaaaaagaaggaaggtwmmtcaagaaacaaaagacaatctaagagtacagcttcctttgwkgagttgtgtagtgaatmccgcaaatccaggaaaaacggacggcttttttgcnccagagagaatgaccccatccagggcccagatggaaaaatgcatggcaacacctgctccatgtgtgaggccttctttcaacaagaagaaagagcaagagcaaaggctaaaagagaagctgcaaaggaaatctgcagtgaatttcgggaccaagtgaggaatggaacacttatatgcaccagggagcataatcctgtccgtggcccagatggcaaaatgcatggaaacaagtgtgccatgtgtgccagtgtgttcaaacttgaaaaaaaaaaaaaaaaaaaaaaaaaaaaaaaagggcggccgctctagaggatccctcgaggggcccaagcttacgcgtgcatgcgacgtcatagctctctccctatagtgagtcgtattataagctaggcactggccgtcgttttacaacgtcgtgactgggagatctgctagcttgggatctttgtgaaggaaccttacttctgtggtgtgacataattggacaaactacctacagagatttaaagctctaaggtaaatataaaatttttaagtgtataatgtgttaaactagctgcatatgcttgctgcttgagagttttgcttactgagtatgatttatgaaaatattatacacaggagctagtgattctaattgtttgtgtattttagattcacagtcccaaggctcatttcaggcccctcagtcctcacagtctgttcatgatcataatcagccataccacatttgtagaggktttactngcyttaaaaaacctcccacacctccccctgaacckgaaacataaaatggaakgcaatggtggtggtaactggttaatgcagccttaataaatgggttaccaaattaaaggccaataggccatccaccmaaaattttccacccaaattaaaag

SEQ ID NO: 26 - DNA, 1472 bp, Homo sapiens
ggccacgcgtccgcggtacggtggtgcggctgcggcagcacagacccagtgcctacatccttgtctccaccgtgctaaccctcatggtgccctggcacagcctggaccccgactcagcgcttgcagatgccttctaccagcggggctacaggtgggctggcttcatcgtggcagctggctccatctgcgccatgaacaccgtcctgctcagcctcctcttctccctgccacgcattgtctatgccatggccgccgatgggctcttcttccaggtgtttgcccatgtgcacccccggacacaggtgcctgtggcgggcaccctggcgttcgggctcctcacggccttcctggcactgctgctggacctggagtcgctggttcagttcctgtcccttggcacactcctggcctacacattcgtggccaccagtatcattgtgctgcgcttccagaagtcttccccgcccagctccccaggcccagccagccctggccccctgaccaagcagcagagctccttctcagaccacctacagctggtgggcactgtacacgcctccgtccctgagccaggggagctgaagccagccctgaggccctacctgggcttcttggatgggtacagccctggagcagtggtgacttgggcgcttggcgttatgttggcctcagccatcaccataggctgcgtgcttgtctttgggaactcgaccctgcacctcccacactggggttacatcctgctgctcctgctcaccagtgtcatgtttctgctcagcctccttgtcctgggggctcaccagcaacagtatcgggaagacttatttcagatccccatggttcccctgattccagccctgagcatcgtcctcaacatctgcctcatgctgaaacttagctatctgacctgggtgcgcttctccatctggctgctgatgggacttgcagtgtatttcggctatggcatccggcatagcaaggagaaccagcgggagctgccagggctgaactccacacactacgtggtattccccaggggcagcctggaggagacagtgcaggctatgcagccccccagccaggcaccagcacaggaccctggccatatggagtagctgatcagcccacacttgccccgccctcccacacctgcttgggaggccagagaggccagacaagccgagagccccttctgttgtgggcagcctgggtttgcaggcctgcacaggctggggagtcctcaggaccttaggaccttcatccaggggctgggcttcgggtcttcaggagtgggccttggctggtgctggtgccatggactctgcccagagccttcttgtttatgatcagctccagctacctgggcagttgtggtggggtggatgggaaggcccacagcccaagggatccataataataattgcttggccagccatgtggcctgctggcgtaaaaaaaaaaaaaaaaaaaaa

SEQ ID NO: 27 - DNA, 1543 bp, Homo sapiens
ggcacgagatttgattctcatgctcctttcaaaagagcatactagtttggggtggttggttattttcttaaccttagcaagccagcttatttcctatggaagcagaactggaaacagcagatgtccaccatgcttatacaggacactacacactgtctcgacaagccatgttctttcctccctcttcgtgagcactttctctggtgatgagttagtatggactacttgaacctcaaaactgggcctctcacccaaagccaaatgaagtagcgtatgccaggatgatgtttcttttgggccgttggcagtgagactgctaagcaggctgccttaggttttgctgtggcaatgctagcagattgttccctctttcaaaggggcaaaaatatcattttggtatgataactgactttctatttacagtttctggcccccaaagacaaaccaagtggagacacagcagctgtatttgaagaaggtggtgatgtggacgatttagtaagtacttttaatatgcacctggtgttctgtgattgaagtcacctgagctgtaaatacagccacaaaggctgattatcttacacttgttgcttatttgtgttttaatttccaatacaccagaagcttcctacaccattatatattgccattataaattcaatcagataggtaatttcataatagaaattcctgtgtttcatggtgtcggctatattgttcattcagattaatcctctcccttgaagggctgaaaaagactagggagctattccattagtagcaaaatgttgtaattcactgaaattgctgttaaccaaaaataagtaatacaacatggcattttgtgtgggttgacaaatgaaacaggccttaaaagggctacttcttaaatgttctcaattaacttaatgtaaacaaaatagaccgataggcatttgaggatttctggaccccattacaccatgttgttgatgtctgggaagctgtgtagtaaatgtcttttgtatctatccttaatgtttggaaacttcccgcctttaagcttcatatgacaactgaccaacaaacactacgtactatgatgtcaatcttttttagagacattctcattactaaaatgagtggatacttgaatgtttaactcctaaaataatgagcggtgaataaatgagcaagtacatgcatgccttccaatgtagagtcattttcattaaaccctctctcaccagagaagcagtggtatgaaattggcctgattcctttctaagtgtgttgttcttgttcacagttggacatgatataggtcgtggatgtatggggaatctaagagagctgccatcgctgtgatgctgggagttctaacaaaacaagttggatgcggccattcaaggggagccaaaatctcaagaaattcccagcaggttacctggaggcggatcatctaattctctgtggaatgaatacacacatatatattacaagggataatttagaccccatacaagtttataaagagtcattgttaaaaaaaaaaaaaaaaaaa

SEQ ID NO: 28 - DNA, 1239 bp, Homo sapiens
cccacgcgtccgcccacgcgtccgcccacgcgtccggctgcggcgcgatggcggcggggctggcgcggctcctgttgctcctcgggctctcggccggcgggcccgcgccggcaggtgcagcgaagatgaaggtggtggaggagcccaacgcgtttggggtgaacaacccgttcttgcctcaggccagtcgcctccaggccaagagggatccttcacccgtgtctggacccgtgcatctcttccgactctcgggcaagtgcttcagcctggtggagtccacgtacaagtatgagttctgcccgttccacaacgtgacccagcacgagcagaccttccgctggaacgcctacagtgggatcctcggcatctggcacgagtgggagatcgccaacaacaccttcacgggcatgtggatgagggacggtgacgcctgccgttcccggagccggcagagcaaggtggagctggcgtgtggaaaaagcaaccggctggcccatgtgtccgagccgagcacctgcgtctacgcgctgacgttcgagacccccctcgtctgccacccccacgccttgctagtgtacccaaccctgccagaggccctgcagcggcagtgggaccaggtagagcaggacctggccgatgagctgatcaccccccagggccatgagaagttgctgaggacactttttgaggatgctggctacttaaagaccccagaagaaaatgaacccacccagctggagggaggtcctgacagcttggggtttgagaccctggaaaactgcaggaaggctcataaagaactctcaaaggagatcaaaaggctgaaaggtttgctcacccagcacggcatcccctacacgaggcccacagaaacttccaacttggagcacttgggccacgagacgcccagagccaagtctccagagcagctgcggggtgacccaggactgcgtgggagtttgtgaccttgtggtgggagagcagaggtggacgcggccgagagccctacagagaagctggctggtaggacccgcagggaccagctgaccaggcttgtgctcagagaagcagacaaaacaaagattcsaggttttaattaattcccatactgataaaaataactccatgaattctgtaaaccattgcataaatgctatagtgtaaaaaaatttaaacaagtgttaactttaaacagttcgctacaagtaaatgattataaatactaaaaaaaaaaaaaaa

SEQ ID NO: 29 - DNA, 1398 bp, Homo sapiens
ggcacgaggcagctttggacatgtcgggcctcatagggagcatggggtgtggaagtggtggccgtgggctcaaaagctggctgcttagtttaccagctgtgtgatctcaagcagatcaccttcttcttcagagcctcagtttgcctgtcggtcatgccctgcctggaggccgtggccttgatcctgcttatcctgctggttccagacccaccccggggagctgccgagacacagggggagggggccgtgggaggcttcaggagcagctggtgtgaggacgtcagatacctggggaaaaactggagtttcgtgtggtcgaccctcggagtgaccgccatggcctttgtgactggagccctggggttctgggcccccaagtttctgctcgaggcacgcgtggttcacgggctgcagcctccctgcttccaggagccgtgcagcaaccccgacagcctgatttttggggcactgaccatcatgaccggcgtcattggggtcatcttgggggcagaagctgcgaggaggtacaagaaagtcattccaggagctgagcccctcatctgcgcctccagcctgcttgccacagccccctgcctctacctggctctcgtcctggccccgaccaccctgctggcctcctatgtgttcctgggccttggggarctgcttctgtcctgcaactgggcagtggttgccgacatcctgctgtctgtggtggtgcccagatgccgggggacggcagaggcacttcagatcacggtgggccacatcctgggagacgctggcagcccctatctcacaggacttatctctagtgtcctgcgggccaggcgccctgactcctatctgcagcgcttccgcagcctgcagcagagcttcctgtgctgcgcctttgtcatcgccctggggggcggctgcttcctgctgactgcgctgtacctggagagagacgagacccgggcctggcagcctgtcacagggaccccagacagcaatgatgtggacagcaatgacctggagagacaaggcctgctttcgggcgctggcgcctctacagaggagccctgaggtccctgcctgcactcgtcctgcctgcaagcctcccgttggtccccacagcagcagtgcctcggttcctctttggctgtcctcggggactccggctgaggcacatctgccacttttgaattcccggctggagagctggcaggaccctgtggctgggctgggaatggagctgtcagcactctgcgtgggaggcctgggcctgtgcctgcatcccgctcaaggctgccccagcctggggtccccagcctggctgctgctgggccctggataaagagaggccagtacaaagcccatggattttgggcctgtaaaaaaaaaaaaaaaaaaaaa

SEQ ID NO: 30 - DNA, 2535 bp, Homo sapiens
gtaatgggcttagcctgaagtccctcgctgagactgttttgaactttccccttgacaagtcccttctacttcgttgcagcaactgggatgctgagactctcacagaggtaccaggtaatttatgctgccagggatgcccagatttcagtggctctctttcttcatcttcttggataccctttctctaggaattcacctggagaaaaaaacgatgaccacagtagctggagaaaagtcttgggaaaaatgccagggtgtggtcgacatcccatttcgaagcaaaggaatgagcagattgggwgaagaggttaatggggaagcaacagaatctcagcagaagccaagaaataagaagtctaagatggatgggatggtgccaggcaaccaccaagggagagaccccagaaaacataaaagaaagcctctgggggtgggctattctgccagaaaatcacctctttatgataactgctttctccatgctcctgatggacagcccctctgcacttgtgatagaagaaaagctcagtggtacctggacaaaggcattggtgagctggtgagtgaagagccctttgtggtgaagctrcggtttgaacctgcaggaaggcccgaatctcctggagactattacttgatggttaaagagaacctgtgtgtagtgtgtggcaagagagactcctacattcggaagaacgtgattccacatgagtaccggaagcacttccccatcgagatgaaggaccacaactcccacgatgtgctgctgctctgcacctctgccatgccatttccaactactatgacaaccatctgaagcagcagctggccaaggagttccaggcccccatcggctctgaggagggcttgcgcctgctggaagatcctgagcgccggcaggtgcgttctggggccagggccctgctcaacgcggagagcctgcctactcatcgaaaggaggagctgctgcaacacgtcagagagttttataacacagacgtggtcacagaggagatgcttcaagaggctgccagcctggagaccagaatctccaatgaaaactatgttcctcacgggctgaaggtggtkcagtgtcacagccagggtggcctgsgctccctcatkcagctkgagagccgytggcgtmagcacttcctggactycatgcagcccaagmacctgccccagcagtggtcagtggaccacaaccatcagaagctgctccggaaattcggggaagatcttcccatccagctgtcttgatagctgctttcctcccagttaggacaagtgggaagctggagccaaggttgaagagtcacctcttcccattttagtacatcattaattgtcaaagcctgtgtgacacaactcagaatactaacctagactaatcccaggatgcttctgctggagcaaagatattgtttgaaggagagtttatggttttggattttaaacgggcagggtcttttttcctctcatttttgtggacaagagaggccttcgcctttatttttactctccctcttctgctgtccctgtgcagaggaaaaatgaagaattctcccagaagtgacttgtcaagacttaaaaaaaatgtttttaatgcatttcttccttgtctagtgcctcggtttatctctaacaggggctgtccagtatatcggtcctgttaggaggggagaaaaagttcttccaaaggctggagaagtgaacaaggagtcaaatttattttcccaattcaacttcataattatcatttctttggcttcatgctctcccgtaactcatgtggttgggatccatcccatctgggtcacttcagtctacttcacgtacttgaaaaggctttcctttacacttccaggaccaaacagcaacttcctgccacacacttccaccctatcactgggagaaatccttttctggacatgagcctttgacctgggtggggcagaaagaaccacaaactccatctcccaatagaactttgaaattcactcagcttttcctttcatgctgtttgttgcctgcttgttgcactcctcctgccccagaactgcaagatttttagcttcacccctttctgagagtaatgttatcttttatcagaatcagtatcagttcccctgtattctgtgcttcatcgaatttgcaagactgacctcttttaagcatttaattcactcccagagtcatctggtcaggttgcaatatgaggacttctctgtctcctctgaagcctgggacactgagcttacttaatacattagatgttcaaaagaggagcgttgtttcatctttcaaaatgttaggccattactttgagtataaaatcgacttattaatgattagtaatttttctaaagtattgggaaaactttcttattttataagatcttaacaagcttaaaaaagaattttatgaccagaatccaacaagagctctattttggaattgtgcccaagttggtgatgtttactctaaaattaataataaaactacttgtaagcaaaaaaaaaaaaaaaaaa

SEQ ID NO: 31 - DNA, 1490 bp, Homo sapiens
ggcagaagttcctctgcgcgtccgacggcgacatgggcgtccccacggccccggaggccggcagctggcgctggggatccctgctcttcgctctcttcctggctgcgtccctagacatcacggctgcagccctggctacgggtgcctgcatcgtagaatcctctgcctccccctcatcctgctcctggtctacaagcaaaggcaggcagcctccaaccgccgtgcccaggagctggtgcggatggacagcaacattcaagggattgaaaaccccggctttgaagcctcaccacctgcccaggggatacccgaggccaaagtcaggcaccccctgtcctatgtggcccagcggcagccttctgagtctgggcggcatctgctttcggagcccagcacccccctgtctcctccaggccccggagacgtcttcttcccatccctggaccctgtccctgactctccaaactttgaggtcatctakcccwkctgggggacagtgggctgttgtggctgggtctggggcaggtgcatttgagccagggctggctctgtgagtggcctccttggcctcggccctggttccctccctcctgctctgggctcagatactgtgacatcccagaagcccagcccctcaacccctctggatgctacatggggatgctggacggctcagcccctgttccaaggattttggggtgctgagattctcccctagagacctgaaattcaccagctacagatgccaaatgacttacatcttaagaagtctcagaacgtccagcccttcagcagctctcgttctgagacatgagccttgggatgtggcagcatcagtgggacaagatggacactgggccaccctcccaggcaccagacacagggcacggtggagagacttctcccccgtggcacgcacttggctcccccgttttgcccgaggctgctcttctgtcagacttcctctttgtaccacagtggctctggggccaggcctgcctgcccactggccatcgccaccttccccagctgcctcctaccagcagtttctctgaagatctgtcaacaggttaagtcaatctggggcttccactgcctgcattccagtccccagagcttggtggtcccgaaacgggaagtacatattggggcatggtggcctccgtgagcaaatggtgtcttgggcaatctgaggccaggacagatgttgccccacccactggagatggtgctgagggaggtgggtggggccttctgggaaggtgagtggagaggggcacctgccccccgccctccccatcccctactcccactgctcagcgcgggccattgcaagggtgccacacaatgttttgtccaccctgggacacttctgagtatgaagcgggatgctattaaaaactacatggggaaacaggtgcaaaccctgaaaaaaaaaaaaaaaaaaaaaaaaaaaaaaaaaaaaaaaaaaaaaaaaaaaaaaaaaaaaa

SEQ ID NO: 32 - DNA, 1336 bp, Homo sapiens
ggcacgaggtccagccaagttatctaccctcaaattctggactaatcatgtttgtgctttgggtatttaaaattacatacatatatattctttttgccaaaaacaaaagtcttgcttcttgtcaaatgattgctaaagtagatcttacattttttgttattatgtatatatttatacacacccccaacacacttagtgatttctgttatttcctagggagcacagctttaaggctatgagatacaactaaaaggagcccatctatttggttttccagccaattattgtactcacatttcaggggagaatctgaaattcctgtcatgtttacagcaacaatctatcattcctggctagctctcagcctctctctccttccataggttagaattatgtcattttgttacttagtggccacgtctatttctgagaaagactggttacatttatgtggcatctcaggtatcattaaggaaaagccagagcaggggtgagcagaggtcaaaaccacagacgcagcagggccatttgccgcctttggccgggatcacaaccactgcagtctcccagcaggtaggccttgccaagcctaaggctccccatccaatctagacagaggggcgctcagagcagactttgccgtagcccatgtctggtgagcacaacagggaatgaattgggcactccactcccccgtctctctggcccagccctgaactagatgagctgcatttcatggagcccattttaaaacctctttccttatgactttgttactcaagtccagagttctctgtgcacttctgctagataaggagtgtaagccctgccccccagcactggcagcacgctgggccctccccacacaggacaccgtgcagttccgggggaagctgactcaaatcaaccttgaaatctcatgaaaacaaaatgacttgtctttttatttgatagtgtaatatcattttataaattttttagggtttttctcgttgtaatattgtacagttttgcatggcctggtgtgatcattttttggttagaatataatgctgacaaatgtggatggaggggaagatactgctttagcctatcactccttattttattttgtttggttttatgccctcagtgtcttagggaactttataagagatcctctgctaccaaacaatgatgtggattcttttgcacagaaatatttaaggtgggatggtaaaaaatgtcacaaaagactcctcaccaatactttatgttgatatcacttaatattaaccagactttgctgtattgcaataaaacagagaactgttaaaaaaaaaaaaaaaaaaaaaaa

SEQ ID NO: 33 - DNA, 2633 bp, Homo sapiens
  SITE (526): n equals a,t,g, or c
ttctctaaaaaagcaaacaggcaaaacttcatgagaatcttgatcatgttaaaattttatgtccttcgatttctccctacacacacacacacacacacacacacacacacacacacactcaacatttcctccacccatatcatcactccttagcatctttattccatcaaaactttctaccccttgacattctctgtgcagttttgaaaattaccctctcagcattctctgttcacccccacacctagaccctgacctctagtcaattctactacccaggggtgtccacggttccagcctcctccatgaagcccagttctatgggctcactcctctgggtaagtgggagcccccagctatcatcctcattgtatagaaaaccaactctgtgatgctacctgcccctcttccccttctctcctgaaagagggctggggtagaggtgggaggactggttatggccctggccgggtctgtattcgtactgggaggagtattggtactctgtgtagaaagaaatgggganggggaaatggggtggcctcagcatctccctaagtcccagctttaagtcctcctgttgcagttcgtcgcctgcagcttcgagaggagttggatcgatcttcttgtggaaacgtcctcttcaatggttacctgccgccaccagtgttcccagtgaagcggcggaaccggcacagcctagtggggcctcagcagctaggaggacggccagcccctgtccgacggagcaacacgatgccccccaaccttggcaatgcagggctgctgggccgaatgctggatgagaaaacccctccctcaccctcaggacaacctgaggagccggggatggtgcgcctggtgtgtggacaccataattggatcgctgtggcctatacccagtttctagtctgctacaggttgaaggaagcctctggctggcagctggtgttttccagcccccgcctggactggcccatcgaacgactggcgctcacagcccgggtgcatggtggggctttgggtgaacatgacaagatggtggcagcagccaccggcagcgagatcctgctatgggctctgcaggcggaaggcggtggctccgagataggggtctttcatctgggggtgcctgtggaggccttgttcttcgtcgggaaccagctcattgctacaagccacacagggcgcatcggggtgtggaatgccgtcaccaagcactggcaggtccaggaggtgcagcccatcaccagttatgacgcggcaggctccttcctcctcctgggctgcaacaacggctccatttactacgtggatgtgcagaagttccccttgcgcatgaaagacaacgacctccttgtcagcgagctctatcgggacccagcggaggatggggtcaccgccctcagtgtctacctcacccccaagaccagtgacagtgggaactggatcgagatcgcctatggcaccagctcagggggcgtgcgggtcatcgtgcagcacccgragactgtgggctcggggcytcagctcttccagaccttcactgtgcaccgcagccctgtcaccaagatcatgctgtcggagaagcacctcatctcagtctgtgccgacaacaaccacgtgcggacatggtctgtgactcgcttccgcggcatgatttccacccagcccggctccaccccactcgcttcctttaagatcctggctctggagtcggcagatgggcatggcggctgcagtgctggcaatgacattggcccctacggtgagcgggacgaccagcaagtgttcatccagaaggtggtgcccagtgccagccagctcttcgtgcgtctctcatctactgggcagcgggtgtgctccgtgcgctccgtggacggctcacccacgacrgccttcacagtgctggagtgcgagggctcccggcggctcggctctcggccccggcgctacctgctcactggccaggccaacggcagcttggccatgtgggacctaaccaccgccatggacggcctcggccaggcccctgcaggtggcctgacggagcaagagctgatggaacagctggaacactgtgagctggccccgccggctccttcagctccctcatggggctgtctccccagcccctcaccccgcatctccctcaccagcctccactcagcctccagcaacacctccttgtctggccaccgtgggagcccaagccccccgcaggctgaggcccggcgccgtggtgggggcagctttgtggaacgctgccaggaactggtgcggagtgggccagacctccgacggccacccacaccagccccgtggccctccagcggtctcggcactcccctcacacctcccaagatgaagctcaatgaaacttccttttgaacaacgcagctgccatgatgccttgggatgccctggtcctgggggactcaggtgcctccctgattcctgtgggaaccccgggttcagggccagggcctccttggaataaatggttattgttactaggtccccaccttccctcttttctggaagccaaagtcascctccccaataaagtcctcactgccaaaaaaaaaaaaaaaaaattcgatatcaagcttatcgataccgtcgacctcgag

SEQ ID NO: 34 - DNA, 1534 bp, Homo sapiens
ggcacgagtcaagcaatctgtccacctcagcctcccaaagtgctggaattacaagcataaccactgcacctggtaggcatcaaattttgaatagagaagttaaccatgatgaatcaacacttgcttgaatcgtttggttctccctcctccttgttcattgtctttattctgctcatctggatgttgcaaagatgtaaagattttttcctttgttgctatagagtagtgctaactccatcattctggcagaagcaccaacacccagatcccaaaattaagcatcatttgaagctatactcactgaaatacagttcttctgggcagaacaacttcagaaaggacaaacattggctttctggccacacggaagaggcaaatttaataaaggaagaatggaagtaatgttcaatatcaccaggatagcctacctgaaatttcttagtacaaatgagaagcaatgtggcccatgtggctgctatatgagcacgtggaaagagtgatcttaagttctccactgatcctaatctaatctgttgtattcgcgtgtacccttaattatccatttaaaaagctaattattgctgttagtggtggtggtggttgcatgtatatacgtgtttcaaaaccatctgacacagcctattcaatgctttcctctagttcatacctctgtactggtttcctgtgtctgccacagaaattgccaccaaggtagcttaaagtaatggaaatctgctctctcacttttctggaggctacaaatctgcaatcaaggtgtcaacaggccatgctccctctgaaggctctgcggaagaatcctttcttgcttcttcctagttttgatggttgctgccaatccttggcattccctggcttgtggctgcaacactccaatctctgcctcaatcatcacatgaccttccttgtgtatctcctttgtgtctctgtgttcaaatatttcttccctttctcctgtacatataccagtcattggatttagggttctcttgatccagtatgatcttatctcaactggattatatcttcaaagaccttatttgaacgccttatttccataacggtcacatttccaagtacaagggttaggacttaaaacataccttcttgggggccacaatttaacctattatatcccactacacagtatatgccatgacagaacctctttcatgagaccaacatgaaatgtagagtgatatgattctttatgtgatcaatgagtatttgcagacaatgctgatgattcccctgagaatatcatggctccctcccttacttatttagatatctgttcaggctgggtgctgtggctcatgcctataatcccagcactttgggaggggaggaaggtggttcacttgagcccaggagttcaagaccagcttgggcaacatggtgagaccttgtttttaccaaaaaaaagaaagaaaaatacaaaaaattagctgggtgtggtggcacatgcctgtagttcctgctacttgggtggctggggtgggagaatcatctgagc

SEQ ID NO: 35 - DNA, 1705 bp, Homo sapiens
  SITE (779): n equals a,t,g, or c
gaattcggcacagctttacagtacataggaatttgagaaccacttcacaggaagagggaaacagcccaatatttatttatgtatacacataatcccaagtgtgtgctggggccaccaggcttacctgggggaacaaggactgtcgtgcatgtgagtgacgacattaatagcatttacatactgtacagatgcaacctttgatgatacatatatttgataaaaatgagaaaacagatttgttgtagagtacctgtccacttttatagcatgagaacagtacaatcaactatttattttgcagttactcatttcagtgattgagaatttctgtgctgtgcagagagacggcctgtaattggtctcatcatccacttgattctaacatgatctctgcccaaagttccatttcttgggctttgatatttataatggcgcctgctcttcatcttgtcttacgctttccgagcaagttcaaaccagaaagaaaaggtgaggctagaagcccaaagtgagtgagtgtgaggaccacaaggaagcccaccactccacagtagatgatcaaaaccacatcctcacgtgggaggtagcacttgggagagggtgtagtctgtgggcgtgatgctaccctggaaaggaraagggaaagttatgctgagagcaccaggcacaggttgaacaccgcagtcttagaaacagcagagggaagactgcyttctcaggtccccctcaggtgaggcagggaacgggccctcctcacctgagaccaagggggcccagcnttctccctgcacagctcacccccgaccagcccaggctccagcaggagagacaagtaaggcccaagtgtgcctgagtggaaaatgtctgggacactgacctgtcaaaactggcccctggctcactgggttcccatcaaatatagtgggggatccataacagagttsagagaggcaccgtggagttccagggtcatcggtcagcgaggaacaaggagggaaaggtgtcttcctgccccttgatgctcaamtaagcatctgttccctagaaatacatgtgtccaggtcgtctccatgggcttttctttgcagatacttttatgtggaacaacagtggcaaatgttttcatttactttgaatttgaaaatgttagggtttcctccacctttttatgaagtaaaagamcctgtcgtaccagcatcatgagctggatgcaggagcccatggctgaaaggagttaaaacgcccagtggtcattaagtgaaacatcttttatcaacctgcaaaagctgccagcgttctctgccaggtcaaatgggcatgtttagaaaataagagaagatggctgagtatagctaatgaataaatggttgtttctttagaaaattaaacacacacagagtgtaagaggagaggatacggccctccctgaaggataaagtccmcctggacggtgccctgccctcgcttctcacattaactgcccaggaatgtcatgctgattggttcccggaagggtgtttggcaaggggcagtgtatggagctacgtgtagaaggagagaaatttgtgtgtggcttttgtaaattttgaccgattgcagcaattaaatagttgattactgtgttgatttaaatacttatgaaagctttcagacaaaaataaactttcacgttaccatgaaaaaaaaaaaaaaaaaaaaactcgag

SEQ ID NO: 36 - DNA, 1031 bp, Homo sapiens
ctgacagtcaccgtccggaatcccgggtcgacccacgcgtccgggcgtccgcgtcggcgatccggggtctgggcgcggcgaggtctggtgtggcagatgtggatagctggaccctcctgggtgcctctgcgttatgtcgtttggttgatgcatttggagagaatctgtgctctccacaactgcaggggcaacatgctttcctggcctcttcagatcagggtggctgttcttgggtgctgcaccaaaactccagcagtgggctttcttcaagtggccggctcacctcattcctgccaagacccaggtccgtgttctcacagtgctgccatctttcctccgtgtgagcgtgggctgtgcggagatggacctcggtgtgtgcggggctgcgtgcactgccatcgctcccttctacacgagccggcgtggacccagggctgagctgtgaccacgagggccatcccgacgagccgccatggacccagggctgagctgtgaccatgagggctatcccgacgagctgccgtggacccagggctgarccgtgaccatgagggscatcccgaaactgtgattgttttctgaatgtggaagcgtcggccgagcgcggtccttggagaacccttgctgcggagaatgacgctcactctgcggcctggcctcgcctcmccatcccttctgcamactcacaggacaggattgatggggagagcccaggcgaaacgaagctgaccctastgaccagccctactggcggctctggaacaggcccgggaccggtggcctggagacagtggtcctttctggatgggctgcagtctccgaaggcttcccccactggagtcagccctttaggagtttgtccagtgcctccagaaagctgttttttgggggacggaggacttggcctggaattctggaattcccagggggtcagacatggttatgggaagtttaataaaaccggtkaatcacgtgaattctgaaaaaaaaaaaaaaaaaaaaaaaaaaaaaaaaaaaaaaagggcggccgc

SEQ ID NO: 37 - DNA, 1642 bp, Homo sapiens
gcccacgcgtccggacaatatttgctttctctttttcctttcttccggatgagaggctaagccataatagaaagaatggagaattattgattgaccgtctttattctgtgggctctgattctccaatgggaataccaagggatggttttccatactggaacccaaaggtaaagacactcaaggacagacatttttggcagagcatagatgaaaatggcaagttccctggctttccttctgctcaactttcatgtctccctcctcttggtccagctgctcactccttgctcagctcagttttctgtgcttggaccctctgggcccatcctggccatggtgggtgaagacgctgatctgccctgtcacctgttcccgaccatgagtgcagagaccatggagctgaagtgggtaagttccagcctaaggcaggtggtgaacgtgtatgcagatggaaaggaagtggaagacaggcagagtgcaccgtatcgagggagaacttcgattctgcgggatggcatcactgcagggaaggctgctctccgaatacacaacgtcacagcctctgacagtggaaagtacttgtgttatttccaagatggtgacttctatgaaaaagccctggtggagctgaaggttgcagcactgggttctaatcttcacgtcgaagtgaagggttatgaggatggagggatccatctggagtgcaggtccaccggctggtacccccaaccccaaatacagtggagcaacgccaagggagagaacatcccagctgtggaagcacctgtggttgcagatggagtgggcctatatgaagtagcagcatctgtgatcatgagaggcggctccggggagggtgtatcctgcatcatcagaaattccctcctcggcctggaaaagacagccagcatttccatcgcagaccccttcttcaggagcgcccagccctggatcgcagccctggcagggaccctgcctatcttgctgctgcttctcgccggagccagttacttcttgtggagacaacagaaggaaataactgctctgtccagtgagatagaaagtgagcaagagatgaaagaaatgggatatgctgcaacagagcgggaaataagcctaagagagagcctccaggaggaactcaagagaaaaaaaatccagtacttgactcgtggagaggagtcttcgtccgataccaataagtcagcctgatgctctaatggaaaaatggccctcttcaagcctgggcctcccattggccaaacacagcagcaaaccagaggacaagggagcccagtggcactgtccatagaggacagattcctggggtccagaagagggtggagaaagctgaaggctggagagtgaatctagggcatataaggccccacacagagcccagcacagagacggccttgcagctatcaggaagatgaggagcttccttcatggcctgctgtgggctgagtaaataatatgattgccttctacagcgctagagattcatatgtttatccccatttttcaggtgaggaaatgcttcagatgaggctccaccttgttaaataaattggatgtatggaaaaatagactgcaaaaaaaaaaaaaaaaaaattaaaaaactcgaggggggcccggtacc

SEQ ID NO: 38 - DNA, 1088 bp, Homo sapiens
ggcacgagctaagccaaccgcactgaaggagtggggagaagagcatacgccaggagcctcctgcctcaaagtgctcccctaagtcttcttcctcctgtgctgacctcagggtggtctgacccttccctcggtgtgggggatgtggccctctcaggtgcccctacttgctttctgcttccttctggtgaagtccacctccaacattaacctgcccaccccacccccgtcatccctggagaattccagctttgtcgtatctcagagagggaatctaattgtttttggggggcaaaagaaagcaacgtttaggtatcacttctacttggaccgcatgcctttttatagccaaatttctgtgtatttcgtaaatggatttcgcgttaatggatatttatgtaataactagacttctcagattattgtgagaagggtcaggttggaaggggtgtaggaagaggggtgaggggtagtttttttctgttctagttttttttttttttttgtcatctctgaggtggaccttgtcacctgtggttattggggccaaggcggactcagctcccggggagaagggcctctctgccatttcggtcccaaggtgagctgacacaggcgttccttttgggactgtggaagcatcagatgccagcactgactcaggaacagcaagtcagggcagagaggaggagggaggctgtcaggatggaaatacctggacttttctttgcttccctcgcaaactggggtcttctctaccgaacttcccaggatttcatctcaccatatctgtgtgccgcccccagcaccccccacccacctctggggggcccgtgagcgtgtgtcttcattgcctctctccccttggcgtctgatgaccacagcaaagcactgggaatttctactcttcatgcctcatcctgcagcctcgggttcgcattctctctttcttttcctctttccctctttccctgggattgactctgagtggaataccttggcacatccactaggatctactgtctgcactgttttctttgcatgactttatacgcagtaagtatgttgaaaacaaaaaaaaaaaaaaaaaa

SEQ ID NO: 39 - DNA, 1256 bp, Homo sapiens
  SITE (1079): n equals a,t,g, or c
gggacaagtccacgtatatcgagtcctcgaaggataggcgggggaagattcctgccaccctgtgctctcggtccagccggacgtccatgaccttgggtggcaggaatcttcccccgcctatccttcaaggacaagtccacgtatatcgagtcctcgaccaaagtgtatgatgatatggcattccggtacctgtcctggatcctcttcccgctcctgggctgctatgccgtctacagtcttctgtacctggagcacaagggctggtactcctgggtgctcagcatgctctacggcttcctgctgaccttcggcttcatcaccatgacgccccagctcttcatcaactacaagctcaagtctgtggcccaccttccctggcgcatgctcacctacaaggccctcaacacattcatcgacgacctgttcgcctttgtcatcaagatgcccgttatgtaccggatcggctgcctgcgggacgatgtggttttcttcatctacctctaccaacggtggatctaccgcgtcgaccccacccgagtcaacgagtttggcatgagtggagaagaccccacagctgccgcccccgtggccgaggttcccacagcagcaggggccctcacgcccacacctgcacccaccacgaccaccgccaccagggaggaggcctccacgtccctgcccaccaagcccacccagggggccagctctgccagcgagccccaggaagcccctccaaagccagcagaggacaagaaaaaggattagtcgagactggtcctcacctgctccggctcctggcgaccactacccctgcgtcccggccccctcgcctcccctccctgtcgccctttccctggacagatcaggccggggcggtgggaggcccgcctcaggtcagggcccagcgtgtgacgtaggggccggggcaggccagggtttgtttgtggaggcgctgtctgtccctctgtccctctgtgtttccagccatctcgccctgccagcccagcaccactgggaatcatggtgaagctgatgcagcgttgccgagggggtgggttgggcgggggtggggccgggcncccctacgggatgcccacggccgttcatcatcttgtccctcgtccccctaccacactccccctcctagaccgccgccctttaacacagtctggatttaataaattcatatgggtgtttaacttaaamwmaaaaaaaaaaaaaaaaaaaaaaaaaaaaaaaaaaaaaagggcggccgc

SEQ ID NO: 40 - DNA, 1602 bp, Homo sapiens
ggcacgagaaaacctgtggatttgagttgggatgacattattgatgattagctgagtgtggatttgagttgggatgacattattgatgattagctgggggagtttttgtcttcacagtgttttctccccatgtatgaatgtttcctgtctctgtctttactgaagtcttgtaaagctgtgagtggacttatgtgcctcctgctgccgaggcttggtctgctgctcctcctaccgagtgagcgatgcttctgctggattccggtgtactccctcattacctgccttgctgagtgctcagttgttctgcgggatccagggtttgcgggagctttccaggtacacaggcgccaggcctgcttctccaccctgcgctggtcctgcctgctgctctggtgggtgtcccgggtgagtgcaggccgccctctcataggcagccctcatatgatggctcccagcactttctgtcccaccgttaggggccctgggacctgtgcttccagcgacccagatgggtgaggctgtaacagcctgggccggctgcctctgccctttggtgaccgtgatggggaggtgtccacaaagcaccctatatgttggcttatcctcccgccaggtctgtagtctctacccggtcaccccttcttcctgggaccatgccccagatcagctgctaccctcaagctctaccattagggggcccaggcgtgttcagggaaggtcactgggtgccaccttctcccccatcatcacgctcactgctttctcttgatgggtaaggcttcccgaatgatgggaactaacagtggtggtgaagtcgaggcagacttcatcaggcatttagcatccaaggggtggctcatgagtgcagatacagtgcaggggccggagaggggctgggctgggctgacctgggaggctgaggctgatggagagtgggcaggtagggtggagaggcaggaaggttggtggcagccacatggctgagggctagagcctggccagggagtctggagagaggcagtgggtgggctgggggttcagcctgctgaaggggagcactggtcagtgcccataccccatggggtgaaggcctgggcagggcccaggggcagcttcgagggtgacctggagctgctcaggaagtgagatggcccagcctgacctgaccattggctggcaaggaacgggatggagaagttgtgtcctgggccttcagcgagtgtgacattgtcattgttgggatagctttaaagatctgattgcttatgacatgccttgtagcgctaccagcatcttggcatttggcaggtctagtccagctcgctgtttgcacgtcttctgtcttattcctagaagagagagttcccagcttgcttgatttccccccattgatgggaggctcatcactttatgggagactcattttacttaggccttctgaggatagtttcattctgatagtttttttttttttttttttttggagactgagtttccctctgtcgcccgggctggagtgcagttgtgtgatctcggctcactgcaagctccacctcccaggttcatgctcgtgccgaattcgatatcaagcttatcgatacc

SEQ ID NO: 41 - DNA, 1233 bp, Homo sapiens
  SITE (491): n equals a,t,g, or c
  SITE (493): n equals a,t,g, or c
  SITE (497): n equals a,t,g, or c
gcagcgtgagccaccgtgcctggctggtttggggattttcatattgcatgtgacagaaaacctatctgtaactagctaaatagccctttcccctactgccccccaaaaggcggggtttattgtatcatctgattcagaaatctacgctgggcttggtagtttggtttcgggaacatctggattccaggtctcaaatgacatcatcgctattcatttttctctttctctggttctgccctccaccacgtatcagctttgttctgtgttggcctcagccccattctcaagttcacattcagcatgaaaaggctgatcacctcttccagtcactcaagcaaaaagccccaggtttgctgcaatgggctagaatagtttgactgtaatcacatgaccacctctaagccaatctctgtgggccaggcaccccagtggttggtttargcctggatcttgtgacacactcctgaacacatgactcgagggtggggcanangcanatcctcacacagaactggtgcgtgattccaggtggctgatcaatcacctgtgtccactgtggttgtatcaarggcgtgtgggttgtgctgtgctgggcgtacactagtgtgtgcattggccagctcggkktgccacgttattggctttgggatgctggttcccaggagtggcggtgggaagattccacctgctttctatggtaggaaggcaggtcctggggtgagggtgagccccgagggggaccagtggccactgtggcttgacccgcaggccttgacctgagcattgcaggcatagtttcctgcccctgtaactgccagatcgagacccagtgagacagtggtttccgtcgccagagactgaaatagtgtattccctgaggacccctgaagaagcttggctttgctacgagccagacgtccaggtcacaagtctggctgggacccaaggctcagtccctttataatagctgttgagttcacggagtgagtacaattatgcatccccactgaggctcaagaggtgaagtcacatagccagttagtggtagagatggggcttgaacctgggtcttcctgactcactcagctacctttccatagaaatagggactggaggccgggcgcagtggctcatgcctttaatccccagcacgttggaaggccgaagagggtggatcacttgagggcaggagttcaaacaaaaaaattaaaaaaaaaaaaaaaaagggcggcc

SEQ ID NO: 42 - DNA, 1090 bp, Homo sapiens
  SITE (4): n equals a,t,g, or c
  SITE (17): n equals a,t,g, or c
  SITE (47): n equals a,t,g, or c
  SITE (1033): n equals a,t,g, or c
gatntggcgatacattnacacagaacagtagacatgatacgccaagnttaatagactactatagggaaagctgtacgctgcagtaccgtccggaattcccgggtcgacccacgcgtccgcgcggctcatgcccccagtatcccggtccagctattccgaggacatcgtgggctctcggagaaggcgacgcagctcctcggggagcccaccatccccgcagagcagatgttcctcttgggatggctgttcccgctctcactcccgcggccgtgagggccmcaggcctccttggagtgagttggacgtgggcgctctttacccctttagtcgctctgggtcgcgagggcggctcccaagattccgcaactacgccttcgcgtcctcctggtcgacctcgtatagtggatatcgctaccatcgtgcactgctatgcagaagaacggcagtcagcggaagactacgagaaggaagagagccatcggcagaggaggctgaaggagagagagaggattggggaattgggagcgcctgaagtgtgggggccgtctccaaagttccctcagctagattctgacgaacataccccagttgaggatgaagaagaggtaacgcatcagaaaagcagcagttcagattccaactcggaagaacataggaaamagaagaccagtcgttcaagaaacaagaaaaaaagaaagaataagtcgtctaaaagaaagcataggaaatattctgatagtgacagtaactcagagtctgacacaaattctgactctgatgatgataaaaagagagttaaagccaagaagaaaaagaagaaaaagaaacacaaaacaaaraaaaagaagaataagaaaaccaaaaaagaatccagtgactcaagctgtaaagactcagaagaggacttgtcagaagctacctgggatggagcagccaaatgtggcagatactatggatttaatagggccagaagcacctattaatacatacctcttcaagatgaaaaacctttgaagtatgggccatgctttgnttcccggtggaaggtgcagctatggctgagtatgttaaaagctgggaagcgattccc

SEQ ID NO: 43 - DNA, 938 bp, Homo sapiens
ccacgcgtccgctgccagcagcgcgcagagggagggatgggggcgggtatcggcgtagggccctcggaaagaacggatattgctgtgacaccgcggggacgctctgaaggggcgagtgtcggtgtggcaccggtgcacgctgaaggagccggcggaaccgggtggccatggggatgtgggcatcgctggacgctttgtgggagatgccggccgagaagcgtatcttcggggccgtgctgctcttttcctggacagtgtatctttgggagaccttcctagcacagcggcagagaaggatatataaaacaacaactcatgtaccaccggagttaggacagatcatggattctgaaacatttgagaaatctcgactctatcaactggataaaagcactttcagcttctggtcaggactctattcagagactgaaggcactcttaatcttctctttggaggaataccttatctctggagactttctggacggttctgtggttatgctggctttggaccagaatatgagatcactcagtccctggtgtttctgctgttggctacacttttcagtgcattgactggtgtgccatggagtctttataatacttttgtgataaaaaaaacatggcttcaatcaacagactttggggttcttcacatggaaatataataaaaataaaaatctagtttaatactgcattatttattttcctaaggctaaagaggagcagtcctatgcttttattcagcatcctttatctgtgacttcatgctctgataactgcctttccttccttctgtgcctttgaatacaaatttcagttctgcaaaagtgaaacattaaacattgccaacgcaaattaaaaaaaaaaaaaaaaaaaaaaaaaaaaaaaaaaaaaaaaaaaaaaaaaaaaaaaaaaaaaaaaaaaaaaaaaaaaaa

SEQ ID NO: 44 - DNA, 1585 bp, Homo sapiens
  SITE (904): n equals a,t,g, or c
gggttgctgttggggtgtgtcgrgaggacgtcatgggaattactgatcgttcaaaaatgtccccagatgtgggcatctgggcgatttattggagtgctgctggctattggcccttgataggcttccctggaactccsacccagcaagagccagctctccaccgagtgggggtttacctggatcgtgggactgggaatgtctccttctacagcgctgtggacggagtgcacctgcacaccttttcttgttcttctgtctcacgcctccggccattttttttggttgagtccattagcatctttagtcattccaccagtgactgataggaaatgaggcttttcttcccctgaccaaaactccttccctgtagtccagctgagggacacacatccctgggccctcttctgcccttcatgtctctatcctggatggtccatcttctgggtctccctaacggtaccgtttggtatctgccctttgtgtgcttcacaagaggcagtcccatgggaggtgggtctggccaatggagatgggacaggaaattttccaagacgcttttgggaaatctttttgtagcttttaaagagatgtgcggggaagacatatggatgttagcagccatattggaactgagaacacaggaatggtggaaaggtagaagaaacagagtttttgttgccgttgtgaaattgttgaaatttccttcatgccaagcttcttgttatatgagataattacgcccttattgtataagacaattttagttgtatttggttacttgcagcctgaagtaccgtaactrcactaaagggacgtagtgtgaacatcccgcagtataggcttaagtcacttttgtgaaatttgacaaaggcatagatctttttctatccagtcaggcattgcntattctttccagtaactactgattcccccacttttctgtcttagaaaattgtgggaatcccccctcactctgcctatgttgcactctctctcctcccaaccataactctgccctcagctattaactgtgctgtgtatttatcaagttggtatgttgtatgtacagtgttattcatgtcatcatgagaatgttgaacgcttgttaaatatcttttgctagcctcttcatatgctgttgcatatgactctcatcacaactcagtgagatggaaagtcaaatcctatttgtacaaatgagaaaactgaactctttagagtaactagctcagtattggccagctggtaaatggcagtgttgggattaaaatccagttcttatctactctccctttattcagaagcatttattggatgttgatctttgtttcaggttttgattttgttacttttttatactgtgtatattttcctcagtctacccttctgctctagattgtctggactcaggagattgtggcagttactggatagttatttttaagataatgattgcttttctctgtttatataagtcatgtgtacttattgtagaaagtttgtaagatgcaaaaagtataaaaattaaagttatgcactactaaaaaaaaaaaaaaaaaaaaaaaaaaaaaaaaagggcggccgc

SEQ ID NO: 45 - DNA, 1676 bp, Homo sapiens
ggcacgaggggacttcagaaccacagaactgagatgataaatgagtggtgtttcaagttgctaagtttgtggtcatttgcttacagtaattgtaaactaatacacaagtgtaagtttgttttcttaaagaagaaaaaaacggggaaggaggtaagtgttaaaggatcaaaactctgacaaaaggctggttgcagaacatgacaggttgttgcactggaaactatttgtcatgcaagtttatgttaaaataagtagcttttgaggactttcatttttggtcttgtaaacatgccatttaatattgtccmactgataatactttttgcaaacagaaactgttaaaacctttaaagcaaatattactgtagagaagaagtaatgtgttatgaaactgtgaggatactaagaaggatcctacttaagtttcttcagcataaataaacttgagcgtttcgaccactgttactgagaatgaaattatttcttaatcacttttaatgaggtaaaatttacatacgataaaatgcaccaattttaaagtatagtttaatgagcttgcacagatgtaaatatctgtttaacttctacttaatcaagatatagaatatttccacaatgccaaaattgccattgacccccttccccttctttcacccaactgcagaccccaggtcaccaccaacctactcttgctcaatatagatttaatgtgatgtgtcttttctagagttttatgtcaatagaattgtacactatgcactcttccatgcctggctttctttgctcagcagraggtgtttagattaattcagtagttcatttctttctagtaatgaataggatcacattatacattataccacagagtgtgcatccattactttgtkgattgatatttgggtcatttccaggttttggctattgtgaataaaactgccttgactattcctgwacaagtctttgtattaaggaacatacgttttattttctcttgaggaagttcctagcaataagattgctgggtcatatggtaggtatatatttagctttaaaagcaactaagtgctttccaaagtgactgtacaatttaacattcctacctgaaatgtaagagaattccagttgctccacattcttgtcaacccttggtagcatcagtctctttaagaattctaatggatatgtaatatggactataggtttaatttgcatttctctgttgactaatgatgttgcacaacttttcatatgtctatcaaccattcttgcatcttcttttatgaaatgtctgttcaaatcatttgtccactttttattgtgtcattttattcagttgtaagagttctttacatattctggaaacaagtcctctgtcacatatataggtactttgaaaatctgtgctttgcctttacatttttttaatggtaactttttaagagtagatagttttggttttgatgaaattcaacttatcagtttttcagttatagtatgtatttttatgacccatctaagaagcatctgtctacccagagttgcaaagatatcccttttcttactagaaatattatagttttatttaccattgcttctatgatacattttaagttaatttttgtgtattaaatgaataaaaagttgaagttcaaaaaaaaaaaaaaaaaactcgtagg

SEQ ID NO: 46 - DNA, 1344 bp, Homo sapiens
ggcacgagcgccagataactcaactttcccattggctacctttgggtcaggtgatctccactagacctatcgcctatgcctgatggtgggtcacatggtgcaaatgttgcctgagagcttagtggattagggatgtggctgggctcatggttgacgtccctgctgctgagcccttacgggtcaggctgggagaaggtaccatgttgtgtgactggtcatttgaggtcttgcagctgttgcttgctgggcttggcaggtgttcaaagtgaccatttttctgaagggtttttttctgagtattcctcagatgtactcccctggggccgacggtctttccttccacagggcgatgcttccctacttgcttgtgaatgtttccttcatctccaggttgtctggggacaattctgtcttttggaggcctgggcaggatttacagagggctccatgccagctccttcctgccgggtccacttctggtgtagggtaaacacctgcccattcatgtcctagtgttgatagaataatcattttctttcagtacagtttcctttttttttttttttgccccagctttttagatgtagcacttaatgccagttctcgagctccccaaacttaagggacacaggtcaacaagcagtaggtctttggaagctcgctctctcacatggtataaggtgagggggacacatggaatgtaaacctccaaactaattatgggggaaaaaggaatgagaaaaacaaacacaagaaggcaaaacaaaaacacctggttcaattaaaaacaacaacaaagcaaaacaaaaaaaacccaaaaccaaaccacacaataaatgagaaaaaaattacataaaacagatgacatgtatagaaataaaaaaatagaatggaggaactaattccaaatatataagtaatcctaagtggactaaatttgcaaagtaaaaggcaaacattacactggattaaaaaacaaatccagggaatacagtttacagctgatacattcaaaatataaaaacagataaaatataaataaaatcggtacagtggtgtctgcctgtaatcccagctagttgggaggctgaggcaggaagaccccttgagtctaggagttagagaacagcttgggcaacaaagcgagactgtctctaaaaaaatacacacacacacacacacacacacacacacacacacacacacacacacacacacacacacacacacacacacacacagactgaaatggaaatgagccgagatcgcgccactgcactccagcctggcaacagagtgagactctgtctcaaaaaaaaaaaaaaaaaaaaaaaaaaaaaaaaa

SEQ ID NO: 47 - DNA, 1474 bp, Homo sapiens
ggcacgagctaaaatatgcttaaagtaagatgtttctatgttatgtggttatgttatcaataatatttggttgatcttcacatattttatatgcatatatatatcaagaagttatatatatataactcaagaaactcaagttatatatatatgtcaagaaatgtatgattattttggagagaatgggcccaaatgtgaaaaagatataaaaaaaacaaaaaaaacaaaaaaaaaacactattttcccctacgaaatatactgtatatttcaaaagaagaaaagttaaaagatatttgaagattgcaggggcaaaacaaaaacctaccagggctcagcacttaagcacttttcccacatccagggtcaaagcagcagtaactacatggacttttaagtgcggtatgaaatgcaacattacgcttacaaacagtactgtcaaacctcaaatgctttctttcttcagatgctttttcgtgtacatgatactagtagacacttttctctttatatttactgatagtgaaaatcatacgcaataaaatattgatgtttgaaggcagtggtcaccaattggttaaaaaactatgaaatgtaaactgaattgttatatctctatcctttttgcttttctctgtgtttttaatgtatggaataaatctcataaatagaaagaaaaataatctagaaatttttcaaagctagtactctttctccttataaatgtacacaattttaatctttttacaaatttatttaactgtacctactgtacttattgtagattcaatgacgcagttaagtcatcacccaaggatttatgaatttgagattactgacctgttttcttcatattgcattcacatcaatatttgtgaatttgttgttcagcttttcattcaaacaaaaaatattccctcaagaaagctccctttttatcataaacatttcaacttacccaacattagaacaagtctgccatgttaaaaataatttaaagacttatctctgaaaacggtatccagaaacgcaggtgttcccagtaatgtagcttcaaaaataaaatgtgctatttatatgactgaaattcataacttttggaagggtatatttatgacagcataaaaaataaattctgtgctataaagaagatccaacaaattaaccatataagcacagaaagtagagaaacacagttattgaatctactcttgtcattaacattttcaaaaaacaaaatgcatattgtaatatttggtacatgacacttgcatgttgatatgcctatatacttacaaagtattcaatgtgtacttagcggcgcttaaaatatgtcatgtacaactcttataaacatttttacagggttcccatttgcacttcatctttcagtaaagtcttgtcagaaaaaaattgtctgataaatatggaaaaataaaatttgaattttagttaaaaaaaaaaaaaaaaaaaaaa

SEQ ID NO: 48 - DNA, 839 bp, Homo sapiens
ggcacgagggctacgatcctacagtggagaatagatgagtacagcattctgccctattcattcatcattggggtccatggttatgtgcttgtgtattctgtcacctctctgcatagcttccaagtcattgagagtctgtaccaaaagctacatggaaggccatgggaaaacccgggtgccagtggttctagtggggaacaaggcagatctctctccagagagagaggtacaggcagttgaaggaaagaagctggcagagtcctggggtgcgacatttatggagtcatctgctcgagagaatcagctgactcaaggcatcttcaccaaagtcatccaggagattgcccgtgtgggagaattcctatgggcaagagcgtcgctgccatctcatgtgagcccttgggtgtggggtaactgccttgcttctgcccccggcacttgccatgttccagtggggggcagatcctcaggacttcacgggtatggttgccagctgtgttcctggcccctggacacacagtgtggcatcctcatgtttgcacactttccccaggctccagtggcctggatgtcaatgtttacaaaggggcaaggacctctcatggacactggcctctagccctctgtttttgtttgatgaattctgttataacctatggggtcaggatatgagtcctgggcattatttatccaggacccatcctcttgggtgggttttgggtgttggctgggtaaggggagccggggacttctgaaatagagctggctccctggggtgacaatgtatatatgcaaataaattgagaaatcttttgttgttgaaaaaaaaaaaaaaaaaa

SEQ ID NO: 49 - DNA, 1145 bp, Homo sapiens
  SITE (386): n equals a,t,g, or c
aattcggcacgaggacatattggccatttactctactaataaaagagtactatctactcagtgtcatttactgttactgtagtaattaatgcctttggaagaatcttttgaaatagttctcaaattggtaccactacttggtttggaattatttttttttcttttcataatcaatggttatataaatgtatattgtcctagtcagtattttatatatgctaaggactcactagctggcttggcactaatacctcaataaaaggaatacttcttttggaatcatgaaacaaaagtgartaaacctccaagttatttttccaaccaaccttctttgaaaaatcttggatgagtcactcaaatcaagacatgttataaaattatctgtnattttggtagaacatatacattgtyctaataataatttycaaatattcagtgkaacygtaagkatgagaatacaggttgaatatcycttatccaaaatgcttgggaccagaagtcttttggattycaaatttttaaatatttacatcatacttaccagtttaacatccctaattcaaaaattcaaaattcagaatgctccaataatcgtttcctttgascatcatgtcagtgctcaaaaagttgcagattttgaggtatttcagatttttgaattaggaagactcaacttgtactatcattctatagactttatgattgggtagactacatgagtattgaacccagaaatcattgtctagcaaaagccagtatagtgattaattaccctgtgactattatataatgttcaaaaaagctaacatattagaatgtccttagcgtgcagagagcaaacagagacaaaaagaaaagttaccctgaaaagtttgtcagaaaaatagaatatcagacgctraactactcatccagaattttgtcraaaaagaaaaataagataaaattcactggtagacaaaaagtagtaacataccagtttgtaatttctcagtttcaaaccatgaatatgtatttgtataccaaaaatcatttcaggagtcagagaaggaggatatgccttttatgtggagactttaaacataaaattggaaaaaaaaaaaaaaaaaaactcgtagggggggtcccgtacccaatcgtcctgt

SEQ ID NO: 50 - DNA, 682 bp, Homo sapiens
  SITE (624): n equals a,t,g, or c
gcaaatattaattgccatttactttgaaacctaaaatggtcaagattccattttcctccaggctaataaataataatttgcaatatatagattgtattttgtctttgaaacgctgtgaggagatcctcttaatgtggcatggtctgcttctatgccttgcttctgtgtttcttgagctccgtggagataggccccctctcctggcttctctgcttgagccacataaaatgccacttcacagctcttccctttgaagcctgatccagtatgcatttggagctaattactgcagttgacacaactccatctaaaagcgtcatgaaagattctgtaatcactgataagaaaatgatcttgcaaattattgctgtgtcctcctttattgcctctttaccttaacagtacagtttacaataatgtaaatttttttctaatctttcaactttaaccctagaaattgtagatgttttagcagtggttatgtgatattggcacaacataactatataatttgctcaatattgtggtgcatacctgtaatcccagctgctcaggagtctgaggcatgagaatcacatgaacccaggagatggaggttgcggtgagctgagagcgagtcactgnactccagccaggacgacagagtgaaaccctgtctcaaaaaaaaaaaaaaaaactcgag

SEQ ID NO: 51 - DNA, 770 bp, Homo sapiens
ccaatactcctttactttctttgagttacaatgttgcatctattctgttcacagcccctaggrctccttttcctgctgatctttctaggtcttgactctctgcctcgttgcttgaccgctacccggcttcagagtccaataattatattttcaactttgtcctgtatatgctccacttcttggctggaactctgttcagtttatttcctgactttgaactatctccacgtagtgccaccttgtttcctgatctaaggactgtgcaactcctctccagtcggccacatctctgaccaagggattcagtgaaaactctggtttctcacctgaactttgatctttaaccccagctgacactagtaatggcctttgtgatcaggctctgaaagaagactgacttcatgtgaaccatgtgagcatattgttcatatatccctcaaggtggatccttcttttctaaaaggcatctaaaaagcaacggaagttcttttgaaaatcagaggctgcctttttggtagcagttctttcatttattctgtagaggatccagattgagctctttataaaatattctcctacataatgtactgggatagtcctaacaatagtaaaccttgatccacagatcacatgtgccattggataaaaataaataatgcaragraactcaataagaccagcctgtttaaaggagacatcataaaaacctccattaaaaaaaaaaaaaaaaaactcgagggggggcccgtacccaatcgcctgtgatgatc

SEQ ID NO: 52 - DNA, 565 bp, Homo sapiens
  SITE (10): n equals a,t,g, or c
  SITE (21): n equals a,t,g, or c
  SITE (538): n equals a,t,g, or c
tccccccggnctggcaggaanttcgscacgagcagaaagcaaatcagtggttttctggagtttgacatgggggtactaacaagggaactttttggggtggtgggaatgctgtatattttgattgtggggatggttacatggttggatgcatttgtcaaaacacacttaatggtaatgcaaaatgaatatattttattttatgtaaattatacctcaaagttgaatttttttaaaaagtttcttttaaaaagtaaagacatttgtggtgcttcttgtaaattttactgctgattatgaccttgtttctttagatttgactttccaagtttgaaaagaccagtttaaaaatgacttttgctgggcatggtggcatgtgcacgtagtcttacctactcaggaggctgacgcaggagggtcccttgagcccaggagttggaggctacagtgagctatgattatgccactgcactccagcttgggtgaaactgtgagaccctgtctctaaaaacaaaaaaaaaaaaaaaaaactcgagggggncccggtacccaattcgcccaaaatgga

SEQ ID NO: 53 - DNA, 1356 bp, Homo sapiens
ggtcattaagtcctagtctcattaattgttttcaagcttttcgcctacattttagactaaccctgcttattcctgtgaatcaagtagtgatctcctgcagcttggaagaaaaaataagggatgggtaatgtaaaaatctggatcaatatactggttctgggcaattatcctgcaaattctgccaggtaataaaagtgagtagggtgcccataatccggaagtttctttgtttaggaaaataaaaacaaggaacttcatagacccccccaaaggggaattctatatcttgacaagtaaaattttagatggaaattatctacaacaccacacttacggaaattgctatcctcactctattatttgcaaaagggttatacacagtagcaccttctaactgaagtattaaacagagtttccattgctgtcgtattttgcttaattattatccttatagcagggataatagttactaacaaaaaggaagcatgaaagttttactatcactgagcctggtaggactttttattgggtttagtgatgcagttttaaatgaaacatgccgcttttggattaatacctctagtaaaggaaatttacagatacttaaaaatcaaatccaaattattgataggctcaggaaaatgccagcttcagcctgagtggctacaaacctctttaataaattccagtcttcttatggattggttaacgccttattaagccctctcttgcttatatgtcttgtattgatatttggactctgtatatacaatactataactcgaattgtttcttctcgcctagaagcaatcaaactccaaatggtgctgtaaactgaaccacacatggacaggccattcttccgaggacccttagattgatcccaggggagccctagctgctattccccattcacgcccttttcagcaggaagtagccagaaggagtcgccgcccaaaatcccctaacagcagttagtgtggcatctccacaggaagtaatgttgtaggagttactaagaaattattttaggcagatagagaggaaaaggggtccttgggaagttttcattttttaaagcatctctggaaaagtttcttgtaaagccccggctcttagagccaggctggcaacctttgatatgcaaatgtaagccattagaaaccaggtccacccaggccaggtgtggtgctcacgcctgtaatcccaacactttgggaagcctaggcaggtggatcacctgaggtcaggagttcgagaccagcctggccaacatggtgaaaccccgcctctaataaaaacacaaaaaactaaaaaaaaaaaaaaaaaaaaaaaaaaaaaaaaaaaaaaaaaaaa

SEQ ID NO: 54 - DNA, 1168 bp, Homo sapiens
ttgcmaggaattcggcacgagcacagcctgagatcttggggatccctcagcctaacacccacagacgtcagctggtggattcccgctgcatcaaggcctacccactgtctccatgctgggctctccctgccttctgtggctcctggccgtgaccttcttggttcccagagctcagcccttggcccctcaagactttgaagaagaggaggcagatgagactgagacggcgtggccgcctttgccggctgtcccctgcgactacgaccactgccgacacctgcaggtgccctgcaaggagctacagagggtcgggccggcggcctgcctgtgcccaggactctccagccccgcccagccgcccgacccgccgcgcatgggagaagtgcgcattgcggccgaagagggccgcgcagtggtccactggtgtgcccccttctccccggtcctccactactggctgctgctttgggacggcagcgaggctgcgcagaaggggcccccgctgaacgctacggtccgcagagccgaactgaaggggctgaagccagggggcatttatgtcgtttgcgtagtggccgctaacgaggccggggcaagccgcgtgccccaggctggaggagagggcctcgagggggccgacatccctgccttcgggccttgcagccgccttgcggtgccgcccaacccccgcactctggtccacgcggccgtcggggtgggcacggccctggccctgctaagctgtgccgccctggtgtggcacttctgcctgcgcgatcgctggggctgcccgcgccgagccgccgcccgagccgcaggggcgctctgaaaggggcctgggggcatctcgggcacagacagccccacctggggcgctcagcctggcccccgggaaagaggaaaacccgctgcctccagggagggctggacggcgagctgggagccagccccaggctccagggccacggcggagtcatggttctcaggactgagcgcttgtttaggtccggtacttggcgctttgtttcctggctgaggtctgggaaggaatagaaaggggcccccaatttttttttaagcggccagataataaataatgtaacctttgcggtttaagaggataaaaaaaaaaaaaaaawaaawaaaaaaaaaaaaaactckagggggg

SEQ ID NO: 55 - DNA, 648 bp, Homo sapiens
ggcacgaggtgttttaaacctcagaaacagatttgagtgtttcagtattatagaaacagtgatgactattcatgctctgctagtctatgcctgcaactccaaatgtttgtggttcagtatttcccacctacatttctgtttggtgacattgctcattttaacaaatatgaccgagtctagtttttctttaaaaggatagtttatgagtaatctttaaaaccatttccataccatctgtatataaccatttcggtagagaacacactacactgaaccctgctttagagctgtgtgttgagctaaaaatataattttttaaaaattgactagcaaaatctatggccacactgagaagcctttgaaaatggcaaatacttttcatcaccaattgcccaattcatctttcttctgcttcctcagccttgtagcaaaggctacacagcagcccacagtccacagtctttttgggaaaattggcctgccaccttctttaagctcagtttatttttgacttactttctttgctgtagttatgaaccttggggcattaaaatcccatggcaaggagcataagagatgttctcgtagctctgcgttgtgtgaaatgtccatcttagttttgttaaaaaaaaaaaaaaaaaaaaaaaa

SEQ ID NO: 56 - DNA, 1388 bp, Homo sapiens
ggcacgaggtaagttgcaaggtacacccacgggtgatttatcactcttacaaagatgataactaatgaagaccgcatctagaatgctcttactggagatggtttacagagcatttttaatcatcatacttagatttatattaatatttcttttcaaactaaattattccaaactgtgccctgagataccatttggcctcaagttcttttctttcgtctgtattaaggtgcaaataaaaaagactagtaggaaaagaaggccttatttatgaaggttgtctatagctctgagcttggtagctacataaaatgagtaataacctaaataagtaaaactaatgaagatctaactagattactttgcttaatattaacattttacccgccccccgccgtgaaacatttggcagatgttctgcaggactcatgaggacattggtggctacagctgcttctggcactgcccccccaaccccccagtgaggtgaacttctttacacatccagcaagctttagttatcttcttctcccatttgagataactgtggctacaagaatctcagttaaatcagatgtttaaattaggtgccaaaaaatcttacagacactgaactaatacttaaatcaaggaacacttcagttctccataaaatctggtgccattttccaaagaaacagaggatctttgtttcacacccgtggtactggaattgcaacagtgaggcattctagctctcacatgccaatgcgagtggcattcattcttgctcactcatttctgcttctcattgtcacacttggaggctctttgggggtatgtttcagttgatctgagaaactgggtgttaccaatttactagagagtttcttaaaatgtatctgaaacaaactattaatgggcattctgtggtggtaaaaccaggcaacgcctccctacactatctgtcctttcagagctaagaatctgttattttgaattgttcacgaagagtgattctgactctgcttcagtgcacactttacaaaccatcgagcctcatcaaaggagtgagttgagctgaggaattagagtaaagaatacaggtatagtgccgggcgtggtgctcacgcctgtaatcccaacattttgggaggacaaggagggtggatcacctgaggtcaggagttcgagaccagcctgaccaacatggagaaaccctgtctttactaaaaatacaaaattagctggacgtggtggcacatgcctgtgatcacagctactcaggaggctgaggcaggagaatcgcttgaacccaggaggcggaggttgtggtgagccgagatcacgtcactgcactccagcctgggcaacaagagtgaaattccatctcaaaaaaaaaaaaaaaaaaa

SEQ ID NO: 57 - DNA, 2012 bp, Homo sapiens
  SITE (1468): n equals a,t,g, or c
aattttttaaaagcaattttaggttcatagcaaaatttagcagaaagaacagagttcttatataccctttctgcttttccccaagcctcttgcactaataacgttctgtaccagagtggtatgtttgttacaatcagtgaacctagactggacacctcattatcacccaagaccaaggtttacgttaaggttcgctcttagtgttgtatattctatgagtttgacaaatgtttaatgacatgtatccaccatgatagtatcatacagaatagtttcactgccttcctctgtgctctgcctgttcatccctcccttcctgctgatcttctattgtctccatagttttgtcttttcccaaatgctgtatagttggaattatcatgtaacctttcaaatggccttttcacttataatatgcgtttaaggttttctacagtcttkgcaggcttgatagctcatttttctttagtgctgaatactattccattgtttggatgcattacagtttattcattcacctactgaaggaaatcttgcctgcttccaagttttgtcaataaagctgctttgtaaacatccatgtgcaggtttttgtgtggacataagttttcaactcatttgggtaaataccaagcagcacaattgccgtgttgtatagtaagagaatgtttagtttcataagacatcaccaagctgtcttacaaagtggctgtactattttgcacttccaccagcaatgaatgagagttcttgttggttccacatactcgtcagcatttgatgatatcagtgttttagattttgaccatttaataggtgtgtagtggcatctccttgttgctttaacttgtaattctctaatgacttataatgttgagcatcttttcatatacttatttgccatttgtgtttcttcttcctttttctttttctttttctttttttttttttttttttgagacagggtatcactctgtctctcggactggagtgcagtggtacggtcacagctcgctgcagcctcgatgtcccaggctcaggtgatcctcccatctcggcctcctgagtagctggaactacaggcacatgccaccatgcctagctaattttttatatttttagaagagacaggtttcgtcatgttagtcaggctggtctcaaactcgtgggctcaagtgatccacccaccttggcctccgaaagtgccgggattgcaggcatgagccackgtgcccagccaatcaaatgagaaaagggcagtctcttcaacaaatggtgttgggaaaattgaatatccacattcaaaagaatgaaattagatgcttaccttaaactgtatacaaaaattacctcaaaaaagatcgaagtcctaaatgtaagacctaaaactataaaactcttagataaaaacataggaggacattggatttggcaatggatttcttgggcgtgacaccaaaaacaggcnacmgaagtaaaaatagatggatgacatcaaaatttaaaacttctgtgtatcaaagaacacattcaacagagtgaaaaggcccataaaatgggtgaaaatatttgcaaatgatatatcctgtaagaggctaatatccagaatacataaggaaatcctaccattcaataacaaaaaacaacctgattttaaagtgaagaagtcaagaaaataagatagactacatactgggagaaaatatttgcaaaagatatatctaataaaggactgttatccaaaatatacaaaagaactctaaacgataagaagacaaatagcctgaataaaatacagcaaaagacttgaacacataccccactaaagaagattcacaarrttgggtgcagtggttcgcgcctgtaatcctaacacttttggaggccaaggtgggagaatcgcttgagcctgggaggtcggggctgcagcgggctgtgattgtgmcgctgcactccggcctgggcaacagagggagaccgtgtctgaaaaaaaaaaaaaaaaaaacctcgag

SEQ ID NO: 58 - DNA, 2050 bp, Homo sapiens
  SITE (515): n equals a,t,g, or c
aagaatggcataaattcatccagcttcttacagaattccaaatgcggaatgtagattttttatatagtaatcttgagtttattctaccattaccagttgataccattccagaaactaaaaacttttgtggcccatcagtaactgtggatgccagtgcagcaacaaaaagtatgaattgtcttgctaggaaacactctgaaagagaacagccattgaaaaagtcccagaaaaagaaacaaaagaaaacattggtaatattagatgatagtgatctatttgacactgacttggactttcctgatcaatctattagcctgtcctctgtatcatcttcctcaaatgcagaagaaagcaaaaccggagacgaagaaagcaaagccagagacaaaggaaacaatccagagacaaagaaatctattccttgtcctcctaaaacaactggcaggaaaaaaatgttctgccctgtttctcattgtttaaattctctctctgagttcatgggataacatgtcctncttagatgcacttttaactgatgtaagggracaaaacaaatacggtagaaatgactttagttggacaaatggaaaggttacaagtggactttgtgatgagtttagtcttgagagtaatgatggatggacttctcaaagctctggagaattaaaggcagctgcagaagctctcagctttactaaatgttcttctgctatttcaaaagcatkggaaaccttgaattcttgcaagaaattaggaagagatccaaccaacgatcttactttttatgtttcacaaaagcgcaataatgtatactttagtcagtcagcagctaatttagacaatgcttggaagaggatatcagtcattaaaagtgtattttcgagtcgatctcttctctatgtgggtaatagacaagctagtataattgaatacctgccaacccttcgaaacatctgtaagactgagaagctaaaagaacaaggaaaaagtaaaagaagattcctgcactattttgaaggaattcatcttgacattccaaaagagactgtgaatactttggcagctgacttcccttaatgttccatactaacaatgctttgtatagattatcatgtggtccttaagatacatttttatattatgtggatcttcatggaaaagtatatttctcgatgtacattttaaacaaacaatttgtatatttttttattggcgggtaaatatttaaaatatttgagttacaaattttatatatgattgtaattttttttctgaattttttgtattatctgatttagctttgttggagtattttttgtatgtgagtgaactgtttctggaaggtaragttcattaagatgaactccctatttcaagtgtttatattatatattagcttaatattcagatacattatcttggctgctaacattagtgtcactaaagttggtatacaatctcccactgctaaatttgactggctttacaaaaacaaaaacattatctggtgaattatatttttaacctaaaagttaaggatcctcatattgtacagttttttttgtgtgcttttttttttttttttgagacggaatcttgctctgtcacccaggctggagtgcagtggcctggtatcggctcagtgcaacttttgcctcccgggttcaagcgattatcctgcctcagcctcctgaatagckgggattacaggcatgtgccaccttgcccagctaatttttgtatttttagaagagacagggttttaccatgttggttaggctggtctcttaactcckgacctcaagtgatccatctgcctcggcctcccaaagtgctgggatcacaggcgtgagccacctcacctggcctatattgtacagttttgaacagtatagatgcatacctgtttacaaatgtgtatgaagatagatatttttacctcttatttgttcaatttactttktcttgtattaattagtatattgatctaattaaaggttaaagctaaaggctttatgaaatgtttaaaaaaaaaaaaaaaaaactcgag

SEQ ID NO: 59 - DNA, 1173 bp, Homo sapiens
tcgacccacgcgtccgaaacaaaggaaaatatccccaaagttgttttctagatttgtggctttaagaaaaacaaaacaaaacaaacacattgtttttctcagaaccaggattctctgagaggtcagagcatctcgctgtttttttgttgttgttttaaaatattatgatttggctacagaccaggcagggaaagagacccggtaattggagggtgagcctcggggggggggcaggacgccccggtttcggcacagcccggtcactcacggcctcgctctcgcctcaccccggctcctgggctttgatggtctggtgccagtgcctgtgcccactctgtgcctgctgggaggaggcccaggctctctggtggccgcccctgtgcacctggccaggggaagcccgggggtctggggcctccctccgtctgcgcccacctttgcagaataaactctctcctggggtttgtctatctttgtttctctcacctgagagaaacgcaggtgttccagaggcttccttgcagacaaagcacccctgcacctcctatggctcaggatgagggatgcccccaggcccttctggttggtagtgagtgtggacagcttcccagctcttcgggtacaaccctgagcaggtcgggggacacagggccgaggcaggccttcggggcccctttcgcctgcttccgggcagggacgaggcctggtgtcctcgctccacccacccacgctgctgtcacctgaggggaatctgcttcttaggagtgggttgagctgatagagaaaaaacggccttcagcccaggctgggaagcgccttctccaggtgcctctccctcaccagctctgcacccctctggggagccttccccaccttagctgtctcctgccccagggagggatggaggagataatttgcttatattaaaaacaaaaaatggctgaggcaggagtttgggaccagcctgggctatatagcaagaccccatcactacaaattttttacaaattagctaggtgtggtggtgcgcacctgtggtcccagctactcgggaggctgtggtgggaggattgcttgagtccaggaggttgaggctgcagtcagctcagattgcaccactgcactccagcctgggcaacagagcgagacccggtctccaaaaaaaaaaaaaaa

SEQ ID NO: 60 - DNA, 822 bp, Homo sapiens
ggcacgaggttccctctccccagagccatcggccaggtaccaaagctcagctgtatggattcccaacaggaggacctgcgcttccctgggatgtgggtctcattgtactttggaatcctggggctgtgttctgtgataactggagggtgcattatctttctgcactggaggaagaacttgaggcgggaagagcatgcccagcagtgggtggaggtgatgagagctgccacattcacctacagcccattgttgtactggattaacaagcgacggcgctacggcatgaatgcagccatcaacacgggccctgcccctgctgtcaccaagactgagactgaggtccagaatccagatgttctgtgggatttggacatccccgaaggcaggagccatgctgaccaagacagcaaccccaaggcggaagcccctgctcccctgcaacctgcactgcagctggctccacagcagccccaggccagatccccattcccacttcccatctttcaggaggtgccctttgccccacccttgtgcaacctaccccccctgctgaaccactctgtctcctatcctttggccacctgtcctgaaaggaatgttctcttccattccctcctgaatctggcccaggaagaccatagcttcaatgccaagccttttccttcagaactgtagcctcctctcactgaaggtgggagctgcaggaatcaggtgcagagtaggaaatggaactaacctcaggaaggtggtattgacagaagtcaggacccacctggatgtcatgctatgaaacatttgaagcaaaaaaaaaaaaaaaaaaaa

SEQ ID NO: 61 - DNA, 1077 bp, Homo sapiens
ggcacgagttggtgggcaatagcgcttttctctcaaggggcttttggctatgtgctgcccatcatttcattcatccttgcctggattgagacgtggttcctggatttcaaagtgttacctcaagaagcagaagaagaaaacagactcctgatagttcaggatgcttcagagagggcagcacttatacctggtggtctttctgatggtcagttttattcccctcctgaatccgaagcaggatctgaagaagctgaagaaaaacaggacagtgagaaaccacttttagaactatgagtactacttttgttaaatgtgaaaaaccctcacagaaagtcatcgaggcaaaaagaggcaggcagtggagtctccctgtcgacagtaaagttgaaatggtgacgtccactgctggctttattgaacagctaataaagatttatttattgtaatacctcacagacgttgtaccatatccatgcacatttagttgcctgcctgtggctggtaaggtaatgtcatgattcatcctctcttcagtgagactgagcctgatgtgttaacaaataggtgaagaaagtcttgtgctgtattcctaatcaaaagacttaatatattgaagtaacacttttttagtaagcaagatacctttttatttcaattcacagaatggaatttttttgtttcatgtctcagatttattttgtatttcttttttaacactctacatttcccttgttttttaactcatgcacatgtgctctttgtacagttttaaaaagtgtaataaaatctgacatgtcaatgtggctagttttatttttcttgttttgcattatgtgtatggcctgaagtgttggacttgcaaaaggggaagaaaggaattgcgaatacatgtaaaatgtcaccagacatttgtattatttttatcatgaaatcatgtttttctctgattgttctgaaatgttctaaatactcttattttgaatgccaaaatgacttaaaccattcatatcatgtttcctttgcgttcagccaatttcaattaaaatgaactaaattaaaaaaaaaaaaaaaaaaaaa

SEQ ID NO: 62 - DNA, 2092 bp, Homo sapiens
  SITE (637): n equals a,t,g, or c
gaattcggcayggcgacctttgtgagcgagctggaggcggccaagaagaacttaagcgaggccctgggggacaacgtgaaacaatactgggctaacctaaagctgtggttcaagcagaagatcagcaaagaggagtttgaccttgaagctcatagacttctcacacaggataatgtccattctcacaatgatttcctcctggccattctcacgcgttgtcagattttggtttctacaccagatggtgctggatctttgccttggccagggggttccgcagcaaaacctgggaaaacccaagggaaagaaaaagctttcttctgttcgtcagaaatttgatcatagattccagcctcaaaatcctctctcaggagcccagcaatttgtggcaaaggatccccaagatgatgacgacttgaaactttgttcccacacaatgatgcttcccactcgaggccagcttgaagggagaatgatagtgactgcttatgagcatgggctggacaatgtcaccgaggaggctgtttcagctgttgtctatgctgtggagaatcaccttaaagatatactgacgtcagttgtgtcaagaaggaaagcttatcggttacgagatggtcattttaaatatgcctttggnagtaacgtgaccccgcagccatacctgaagaatagtgtagtagcttacaacaacttaatagaaagccctccagcttttactgctccctgtgctggtcagaatccagcttctcacccaccccctgatgatgctgagcagcaggctgcactcctgctggcatgctccggagacactctacctgcatctttgcctccggtgaacatgtacgatctttttgaagctttgcaggtgcacagggaagtcatccctacacatactgtctatgctcttaacattgaaaggatcatcacgaaactctggcatccaaatcatgaagagctgcagcaagacaaagttcaccgccagcgcttggcagccaaggaggggcttttgctgtgctaaattaggatttgagggtgtgggaccctcaccraattcattgattactgaaaattgaatgttttttgggtccacatttcaaggctgaagtgtgtagtgtatatataacctttcctatggaaatgtgacattgagtacattttgtgttgctgttgtgaagccattaatataaatctttggtaatgacccatatctctatatgtatgtgttcccagttgtgggagcaggcactaatgaaatcctgtgcctggaatggagatatttaggtacctgaggcttagtgtcctgtggtctgcatgtaagatagatgacatcctagaacaaagaagctgttttaacttaatccccctgatcagcaggatatctgtgtgttcagtgacatcatacattctgtatctagaagtctaaaatttctgcctttctcctaaagaatgtgttcttgcattttggttgaaataacctacacagtgttaaaaatcagatacctcctttagtgaccagttcaaattttaatagcgataggtagcccctgagaaatttatcactataactccacaggaaatatgacttggaagtgctctgtgtactaaacaaaataaagcccctctttgcatttaaaaccaaagtcaaaacaaaactcttgtaatgcaattaattaacttyatgtcttcccatgactcaagttttgttaaatatgcccaaaaactttgattggcagtttcttcggttaattattcctatagaatgtattttaagaaatctatacaaattggatatatgcttggtaattctccagtttctaggaggtacctatttctaccgtttcaagtgatgaagtgaaaataatttacattcgatagtgttactgataacaaacctacttaagagatatgttgctttttacttaagggatagtgttgatagataaattagaatgtatagataggtttgtgaaagtctaaataatggctgtatagatatgtatatatggttcacayatctggatctgtgtatttgattttgtactttaaatgtgacaaataaaccttttgggagaaaaaaaaaaaaaaaaaactc

SEQ ID NO: 63 - DNA, 616 bp, Homo sapiens
  SITE (17): n equals a,t,g, or c
  SITE (580): n equals a,t,g, or c
cmgctrctragcaactnagtgggatsccccgggctgcaggaattcggcacgaggagaacggctgcacgtgggagatgctccgtggatgtttgtagaacgctggcttccgtgtttcctcgttgtggctgtggtggtgtgggtctttgcctgtggacccgtggaagacaaagaagacagttttggatggtcaagctattttcttgcttcagggctccctcccctgctttttgaagcctcacaaaccaggactgtgagggcaggaaggcttggggtctttgtgtgctgagcctcattagggttttaagaacctccctcctttcatctctagcttacgagagggatgattcattatcttccctcctcaggctgcagtagaagcagacagtctctgcctccctgcttgcctttcctccctcccattcactgttgattattgccctcaagaataacaggttgcccagctactcgagargcttaagtgggaggattgcttgaccccaggagttcgaggctgcagtgagctatgatcgcttcactgcgctatagcctggcagacacagagagaccctatctcaagcanacagacaaacaaaaaaaaaaaaaaaaaaaactcgag

SEQ ID NO: 64 - DNA, 828 bp, Homo sapiens
acgagaacaccatgctagtgagttcattcctaacagaggagaacttgcatcttgactaagcattagtgatctcaaatcctctgcttatgatttttaaacttctgatcttcagaatatttttccatgagctagctctggctttgtgcatctcaaaccttgtttctctcccatggctgtcatacttctggtgccctgagatgcagaatttatttctacttgatacacacatttgggtattgatgtagggttagtacagcaggtaggttgagaatttctggagcctccctccctccctttgttctgacctttccttagtcatatcatcctagaaagatcttccctggcttcgtctaaaacatggcctctcatttcattctctccctgacaaccctgatgtagttttcatttcaggactcatcaccccaacatcctttcctgtttacagcccatctcccctgctagaacacaagctctgagaggtggaaggcctctattgtgggttttggcgaatccccaatctctagatggtgtctggcatgtgatagagattcaacaaacacttcaacaaataatgaataaagttaaatttttcagagtgcaatcatgcctctcccttcctctgccagggcggaggctgtgcctggtttgcgcggcttctgcagctccagctccttgtactgagtctggagaatgatggagctcagtccattttaatcccatgaacattaaatgcgtggatgtgtggatgctgggatggatggatgacgctcctagcacggcagcttgcaggggattggcgatttccagtaaggtgtgctaagactcgag

SEQ ID NO: 65 - DNA, 581 bp, Homo sapiens
ggcacgagattatgggggcagtttccccaatgctgttcttgtgatagtagggaattctcatgagagctgatggttttaagtgtggcacttcttcacgctctctctcacctgatgccatgtaagacgtgccttgcttccacttcaccttctgccatgattgtaagtttcctgaggcctccccagccagccatgtggaactgtgagtcaattaaaccttttttgtttatacattacccagtctcaggtagtatctttatagcagtgtgagaatggactaatgcagtctctttgttagattgcctatgtttcttgactgtctaataagatatgactttcagtgatacaaatgatcagagaaccttgcaaagctgatgtggtggagagagttcagggagaaccagagtggaacaaaccggaggaatgaatatggtagagtgcaagtgaatttgctcctgatttccagaagcagttgtcagcaacagagtttacccttgtatagcattaaaatagtctaggacaaaccagaaagtccataatgtcctccagcattaagagagcacctcgtgccgaattcggcacga

SEQ ID NO: 66 - DNA, 789 bp, Homo sapiens
ggcacgagcctccttccagaagttccagggttttctttgatggttgccattctgcttagagaacttccattagcctttcttttggtggggtcttctggtgacaaattctgtttcacttcctctgagaatgttttgctttccttttcattcctgaaggacatttttgctggatataagaattctgggttaatggttcttttcattgtttaaaaaatattttgtactttcagctgggctccatggtttctgatgagaaattcgctgtcatttgacttgttaatgcacgatagttaaggcagtttttgtttagtggcttttgaaatgttttgtcttttgttttttggagtttgattattgtatgtcttagtttggatttctttgggttcatcctgtttagggtttgcttacctaagatctgtagatttatgtctcttgccaaatttgggaacttttaagccatcattcgtagagtacagtttcaaccccaccttctttctcctgtcccttcgtgagttcagtgactggagttgttatagtcccataggtccccaagactggttttttttttttttttttttttttttgctgggacatttctttctctcttcccttcccatcccgtcccatccagtcccgtcccgtcccatcccttcctgtcccttcccatcccttcccgtcccttcccatcttcggagtctctccctgtttcccaggctggagtgcaatggacgttctcggctcactgcaaccgccgcctccctagttcgaatgattcttctgtctcagcct

SEQ ID NO: 67 - DNA, 884 bp, Homo sapiens
ggcacgagcagaatcagggcactgagctctactgtaagtgtgtatttaatctccatttttaatttgacccatagaaaattgtctttatagaccaaaaatggtcaaagatgagcaatttcatatctattacatgcttagtgttcactattttggggcatcttgtttctctccaggttgcgcattcatctgtttttgagtttaaaaccttgtatgtgcttaagaccaatagatattctcagtcactttttagacatttttgtcacctcagttttatcagaactagaaaaatcttccttaaaaacaactgaaaccttttcttttgcagtgtttcttttgctaatgatgaactaatattaacaacttaccttctaataactttgtctttgtaactcaggtttaaaagcattactccaccaatctcttttattctccattaaaagatattatttcctttataattcatttttattccttatttgtttagtgccttaagtctgtttctgtacagcttggagactgtaacttggaaaaatgtagatatattcattatatactatctcacttaaatgtgaattctgaagaagtttttctgagaaaataaattcgtcttgtttgagtgttccttctctgtctgctgtattctaccagggggacagaggaaagaagggcagagaaattctttcctggatttcatgaaatcactgaggccagagcaacagatcatttaacttttctttatcccgtgtatgtattactgaaaaaaatggtacataatagaatttgagtttatttttatctgacttcaggtacatagggacacttcctgtttaaaagaactctgcattgaattgtgcctttcataaagcaaaaaaaaaaaaaaaaaa

SEQ ID NO: 68 - DNA, 866 bp, Homo sapiens
ccacgcgtccgctccaaacaaacaaaaaatgaactttatttagatatattttacatatgatgaagtatttttttgatgtagtagtttttctcaccttctttttagtcttctctttatccatttttctttctgatgaagaattccctgtgagtaggacccagaacataggcctttgtcatttcaacccttcgttctctgaataggctgtttattggcaacattaactggaaacattttatgtacagcattggagtctcactctgtcgcctcagctcactgcaacctccgcctcctgggttcaagtgatgtgcactgtatgaactgtgagagcaagcatatcattataacattggacaatgagccaagacagttctgatggacttttgaagagggatttttcaaaagcatttaactcatcatattaataaaataaatcctatgatttatgggaaattctgttggatcaactttggaaactgtttactataaaggtagcatgcgtaggcatgaatcttgataagacaagattctgatccggggttctgagtgggtccttatattctgcagagctgaaccaggtggaataggaggagagtttgggtaacagtcaaacacaacatccaaaattatgttgaatgtagtggtgagagctattccctttaaaactctctcttggttcttctgactgtgtcaagaatactgtatttgtttggtactggtctggtttttttttttttttttttgaaatgcactccagcctgggcgacaagagtgaaactctgtctgaaaagaaagaaagaaagaaaaagaaagaaaggaaagaaggaaggaagaaaaaaaagaaaagaaagaaaaaaaaaaaaaaa

SEQ ID NO: 69 - DNA, 1352 bp, Homo sapiens
ggcacgaggtgatccacccacgttggcctcccaaagtgctgggattacaggtgtgagccgctgcccctggccctaaatagattttaaataagttttctggatgcacacactagtaaacacaaatgccaaagacttgccttccaattctctgtctacctctaactcaggctgttgtcttggcacagttaaacaacttttctagcctcaatattttcatcttcaaaatcaaaaataaaatgtattacatatggatctatgacaaatagtgatatattccatgtgcacgttatcattaaacatgaattaaccaatatttaaatctttttttttttttttttttttttgagacggagcctgggcgacagagagagacaccgtctcaaaaaaaaaaaaaaaaaaaaaaaaaggtaattatggtaaaatgaggtcattagggtgggccctaattctaattcagtacaactgatgtctttattagaattgcaagtttgggcatcaagagacacactcacgcggggaagaacacgtgaagacacagggaggagacagggtttacataaagtcaaggagaagggcctgaaacattcttctttcacagtctcgcataaggaaccaaccctgccgaaaccttgatctcagacttccagcctcaagaactgtgagaaaataaatttctgttgtttaagccattcagcttgtggaacttttatatgatgactctggcaaactaatatggcattacacacaggggataagaaaataatccaaataagtatatgtatcaactaccataagagcagattgagttcctatcctaaaggaaaatactactattagataaattttagaaatttatctaataaagctataacaatcggtaaagctcataaattttcttactgtgaacttatatatgaatttaaaatggaaaggtattatgtactaattcttgtcccgatcagaaggtttacctgtacccctcaaataactatcaccagaatgaaggcagcagttacatgaagaagcacaaagaaccaccactaaagatctaatggtacccaatcccttttaaagtatgtctgtgtctatattggttaaccttttcttatctgaaatacaaatgccacatgatctcacttataagtggaagctaaacattgagtacagatggacacacacaaaaagaacaacagacacaggggtttacttgagagagaagggtgggagaagggtgagggtggaaaagatacctattgggtactatgctcactacctgggtgatgaaatcatttgtacaccaaactccagtgacacacaatttacttatgtagcaaacctgcacaaaacaaccc

SEQ ID NO: 70 - DNA, 913 bp, Homo sapiens
ggcacgagtgaatatttttaaggctcttgatttgctggaggactgaaaaaaatgaagtgatagtgtctgagaatattcatttgacttattttttacagcatccattccctttcatgttgggagtgttctctttagtggcttaaattctttgcctgcctttgggagtgtggagggtggagtggaccttttgagggtcgagggtgaatgtggccttgctgtttggatagccttttgtttggattctggctctgggcacagggaataacactactttctgaggacagtatcaggattgtctgtagttcctgtgagcctgaggtgctgcatgtgcccacccccgtgtacaggccctgccccagccacagcccactcaccttttgaccctcctgctctgcctatacagtttgaataccagcaggctcagctggaggctgagatcgaaaacctctcatggaaagtggagcgtgcagacagctatgacagaggggacttggagaaccagatgcatatagcggagcagcggaggagaaccctgctgaaagatttccatgacacctaagttgggatgtggatgtgccggggtgaggaagatgtggctgcaaggtctcccggctgccatactgcatgctgcaggctctgcctttcatgaccccaggcaacagccagggccccactcctgagagacactggcaacacctcttagttgatttctgttttcttctcttttcactttttgtttctaccagggtagaggccatgttgaactggcctcttttcaggacttttatttccccctggatggttgttgggagggagggaaagtgttttctgaatggctattaatagtattagatcattacaacttatgtaactttcaaaggttgtacaattatacaaaaaaaaaaaaaaaaaa

SEQ ID NO: 71 - DNA, 721 bp, Homo sapiens
ggcacgagcttaaatacacttttatttgctatttctgtgaagcaaactgccgttggacttcccattaaacaatgtctagaatctttgccattgtctctctatgctagtcacacttacagcacctactttcagactcctcatctttcaacctgttgtctcctttcagttgctggattaagtatcatttgggctacatgttccccccttgtccctaaaattccttcccattccaccccagctattctaatgcatttaataatatgtctttggatatgtatgatttcttcaatgtacagtggaatgtattccaatttacataaatagttctacgttattttctgttatggcccttcaatcaattccaagtttcaccttattgatctcattctttctttccactcagtgcttaagatgtgtgtacaactatgaatgcatcctattcatggcatttaactgcaggatggtgttctagtattcatccgaatttcccttatctgatccactagtgatggtcattgtgtcaattaaggtaatgttagctaatggatcaaacacgatgagtttactaataggagtatcagtcatttctggctggatgcaatagctcatacatgtaatcccagtgctttgggaggctgagcagagggattgcttgaccccagattggagaccagtctgggcaacataatgaaatcctatctctacaaaaaaaaaaaaaaaa

SEQ ID NO: 72 - DNA, 563 bp, Homo sapiens
ggcacgagataagatcgccttaataccagaaatgattagaagtgctgatttagattcaacaaataccatatgtccttatcattttttgtaagaagaaattggttaagtcctaactttcaatgtgtacccaaatacttgtatttatgcttttgataaaatgtattttcagcattaatacacatccgattatgccttatttatatatgaagaataaagttaccatgttatactgttatgtcctaaaattcaaatcactatttgagaaaccctcaaattggtgctttcattatataatgatacatttagacaaaaccccaaactaagccatttgaaacaagattctctccattgcagtttgtagcaatgttatttctgtgtatgtcatgagaaggctaaatatcagtgttaatttcttgtttgaatccgtgaaatcatgcctgtaaagcccaaacatttgtaacaaactccctaataaatttagagaaagtcaaaaaaaaaaaaaaaaaaaaaaaaaaaaaaaaaaaaaaaaaaaaaaaaaaaaaaaaaaaaaaaaaaaaaaaaaa

SEQ ID NO: 73 - DNA, 1694 bp, Homo sapiens
ccacgcgtccgggataaactatttatcataaatttaaatgttgttattgtgcctttattgcacattttttctcatgccttttattataaaatatacttgttttcaccttgtttttggtcaaatcccagttactgtccatgtaaacatatggcaacataagaacgtcactttttttatcctgcactgtggcatacctgctcttacaagagattctgctgcacttacatattcaaatgatggcacagttatagagactttattattcttaattctttatttagacttaaacattatttgttgctaattaaaacagttcatatgatgaactttataataaaatatatatttttcaggccaggcatagtggctcatgtctgtaatcccagcactccaggagtctgaggcaggcggaccacttgagcccaagagtttgagaccagcctggacaacatagggaggtcctgtctccacaaaaaatttttaaaaaattagctaggcattgtggtgcattcttgtggtcccagctactccggaggctgaggtaggaggaccacttgagccccagaggtcaagggcgcagtaagttgtgagagtgagactctgtctcaatgataataatcataatcataataaagatatgtaccccagagtcaagaatgcaataagctgtgagagtgagaccctgtctcaatgatcttaataatagtcacaataaagatatatattttgcatcagtctgtgggtaattgaatgatgattgctggagtaaaactgagcagaatggtacagtgctgtactgtacagtacataagaatcaggagaggcagctgttttaagccccagtcttattatgcccatttaatcaaggcatgctggctcctgtcatgaattattctgatgttgagtaaaactgtcatcttcaattcatatcactttcaaatgttacattataagagaaatgtaacctggtaagtactaagttgtagattgttacagagtcagaaaagttggatgtaattgctgatattgattatggtaagtagtctttccttgctaaaggaatgccaatttttaaacaaattataaagcaatcatttttacacaaagatgaaaatacacatgggtcctcatatgctaaaatgttatatgtataggtttaaatatctaatttggaaaagctagacatataaataggttttcatccttgcagctaccaatatcaaactatacagttcttgttagtacctcctctagggtgtttggagagggggcagagaaaagagctcaaattcaagttgtttttatatctgacataattttttaaaattataagtcaaatgtttgttaagggaggggatttaagttattaattaaaataagatttttagatcttcagattttacttatctatcctaccttccattgttattgagagttggctgtattttcttttttttttactccctggcctgatttaaagatactctggaacattccagaggcactgaatttatcattctaaaagggccatgtagtactcccaggaggcatagagctgagccactcaatgtgtcttgaggttccaaaattctgattctatgcttttatgaacatgtaatttagcagatgttacctaatagcaaaagaaaatgctatctttaccagaatgcacttaggaaaaaaaaaaaaaaaaa

SEQ ID NO: 74 - DNA, 1215 bp, Homo sapiens
ggcacgagcttttcagtactctcacttattcatgacacaggaatgaccctttactcaaaactcttgtggttgttcaaaggtgagcttctttttcccttagtcttagcctatgtgttgctgttgtatattgttaccaagttcaactacctaattttgaagctctttccaaataagatacaaattaaaaggggaagcattgccagtaacaggtccctagagagcagtgccagcctgcctgcaagaaaagaggagaaacttcttaaaaagttttaagcctgggcaacataaggagattgtttctatgaaaaataaaaattagccaggatggtggtgtacacctgtagtcccagctactcgggaagatgagattggaggatcacttgggcctgggaggttgaggctacagtgaactgtgattgtgccactgtactccagtctgggcgacagtgaaatcttgtctaaacaaaaacaatttaactgggaagcacagtggtccttgaggacatttaatatcaggacaaagagcctatgaatatatcactgatgtatataaaccctaaggcgttaataaaagctaactgtttagtgttatccatttaagggaacaggaggaattgcataacttttagattagtcatagtggtgcctaagggatatgctgtggtatatttgtatagccagggcacttagccttccaaccaatttatataccatgttcttcaactgtgggtgagatttagcctcaagatttgatttactatatgtaagtacattacttgatttctataaagaatctttagtggaagatgttattctgaattatttatcaatatgattaatccagttagaaattattaatgatcttcctttatactatacataggataacttttaacttgtcgctacagttgttgctctgaggatcttaattttgttactttctaggctacatgaagctatctttttaaaaagtgtactcttcattttcactgttattgtgtacttagcataaaaaactcaaatctaggccaggtgcagtggctcatgcctgtaatcccagcactttgggaggctgaagcatgcggatcacttgagcccaggagttcaagaccagcctgggcaacatggctaatgaacactaagcatagttttgatgtctttcatattaaagactttctcaaattcttaaaaaaaaaaaaaaaaaaaaaaaaaaaa

SEQ ID NO: 75 - DNA, 1794 bp, Homo sapiens
  SITE (1675): n equals a,t,g, or c
gctcctctagtgactgctggggtgctagttttcacggttaccacagaacttgagagaggaaaatgagaacggcaaattaaaatgccataaaattccattcttaacaagcgttagtttttttttcctatatatccactccctcacctatcttatgacatatgagaaatcctaacatgggacttggtgtataattagcattgaatgaatttaagttttctttctttctttcttttcttttatcttctgtggtctcctgcagaatcagtctataaaaagggcatggtaaaaaaaaatctatctcatagcattgttgaaaagattaaatgacataataagatgatgcatatatagtagctagcactgtacctgatgcatattaggagcttgataatattactaacattatcatcatcaatgctatctgagcaaagaggctgttccttctttccagccagagttcttctgttggataatatttccagctgtgaaccccaaccagagaccttgaagcctttatttccttttctctcattggcctttggctgaagtctcctttctgcagagaacaaagtgaccagcttttgatgaactattttcctcttttatccatttccaagtgttagccatagtgaagaagtgtagctgggtgctagcccaactcaagaagtgataatgtwatatccaacccaagataaactcaaggataactttcaacacggctactcaagcagttcaggggggaggcatcttgtagagaggagaccaggaagtcacttggcagctgggccagcacacagagggccattgctccagtaaagcagctaacctccatctcttcatcaaaccatcctagactcagcactctgcagagaaggagcagatggagggaatgtgtggagagattagataagaaggatttctaatctagtgggggagcgagtaaaatgtacagaagtttgagaagccaagctcttatgtammaatccrcccccatcactcaacaatccccactgtatgaataaagcctggaaagtttccaattaaaacagtgcttgtgaatattggcaaggggtatctttgtgtgcagggtacatttaaagggagaagggtgaagatacacccttgccttytaggagtacactttctgagagcttgttcaccaggctgtgagtttctcagtctatctgtttctcagtctgttagtaatgaatgtatctcccacttagcacagcagctagcacatagtagatgcctaacaaatgtgtgttaaattgaatgttggaagtctgtgtcctgaaagcttttcttcacatattacaaggctttttatttgttcaacacatttttaccaagtttttttctgtgttccaggtcttttgattagctgtttttaagtcacagaaatgggtgtcgggaacaaaaccagtcaaaagtcctcattctacatcatttacactttcccttcctatatttataagttttaatatcagcttctacaataggttccagaacaagtggtgctcaaggaatggagaaaatgactattccaaccctagctgtaggtgaaccaaaaaccccagagaaatcaaagtgtagtttaaagcagtgcttctcaagttgtaatgtgcatatagatcacctggggttgttattaaaatgcaaattctaaaagagncaggagaatatcttgagcctgggagccagaggttgcagtgagccgagatcattccactgcattccagcctgggtgacacagcgagactccatcttaaaaaaaaaaaaaaaaaactcgta

SEQ ID NO: 76 - DNA, 1174 bp, Homo sapiens
ggcacgagcaaaggcaggaacttttgtcatttttgttcttcaagatgtccccaatgcctacagcagtaagtgcactgctgggcacacagtaggtattcaataaacattcaatgaatgaatgaatgaatgaatgaatgaatgcattgccaaaccttgcatggctgccttttgttcctgccctagctgctgcctccccagccggcctggctgctcccgagagcagagatgtgccttttcctgtgagccctgccacacagttgaacattgggtagagcccatgggccaggggcagaggcaggaacacactcagggcagcgtgctgccttcctcccatccttctagaggcaaagccaccacagtccattcctgttgccaagagccttgggggtaggggaagtagacaggaattcaccactccttaaaaccagagaagtccagagtcctctgagggacagggctcttgatgttcagagggaatcagcctcggcctggggaggctgggatttgggtggtttattcttcagcatccacttcttctccagggagtctgtcagtgacaggaaaagtgactcagaaccccagagccaggcctagtggacactaggttctgcctgtcccatggagggtgctgtggctttgacggattagaagtcaggacttggccatcatgactacatgctttaaaaaatatgagttttctttttttgttttgggttttttaaggcggtggggggctactttgtgtttaggttttacatcctttgcaataaagttccacccatccagcttgtgcagtgaaaaagagggaaaggacttcagtggctttgccttgtctatacatgggccagagagaaaaaaggaagagggctgggcgcggtggctcacgcctgtggtcccagtactttgggaggccgaggtgggaggatcacctgaggtcagtagttgagaccagcctggccaacatggcaaaatcccgtctctactaaaaatacaaaaattacctgggcgtggtggtgggcatctgtaatcccagctactccagaggctgaggcgggagaatggcttgaacccaggaggcataggctgccagtgagccgagatcatcccatggcactctagcctaagggatagagtgagactctgtctcaaaaaaaaaaaaaaaaaaaaaaaaaaa

SEQ ID NO: 77 - DNA, 1087 bp, Homo sapiens
  SITE (408): n equals a,t,g, or c
  SITE (1005): n equals a,t,g, or c
gtccattcttaccaccactctcccaggtaaatgctccatcttctctgtcttgggttgcatttggtcccacctggtcttctttcagttaactcccttcagtccacccaatgcagtcttttctctgcagccaaatttttttctatagttcaggtctgatgataccactttccattttcaaactccttaaattggcctcggagacctgtgatggccaatcttccccacccctgtgggtcaggttcctctggtgtgggcctatctcttagtgcaaggctccctgtagactgtcctggggctgcctgtctaattgtcttctcatgaaccaggtaggcargcaggaaccactcatctagtctgggggtgactggggggtgcgaaagttttgttacaggatgtatttaacacttncattgtctggctcaaaattctctttgaagaaactgcctttgtttaattctgtttawttatttagaacttacctagaattgatttgcacttgcaaaaatgctgctgttttagagtttgctttctaggctggttgcttgctctgtcaccttagctaaaaactaggtactggagtgccttttctattcycttctcttctttctttcttcttcttttttttttktttttttagtggagtctggctttgtcgcccgggcttaagtgcagtggcacgatcccggctcactgcmtcctccgcctcccaggakaagcccttgaacctgggagggagttgcggtgagcggagatcgggccattgcactccagcccgggcaacagatcctgactcttatcaaaaaaaaaaaaaaaagaaaattaaccttagtttaactttcttgctttaccaagtttttaatttttaaaattttttactcttttgtaatagcacttagtttaaaacacaacacattgtacagctgtactaaatatatcttcatttatatcattgttccatagcttttttcttttgtgtgtgtgtgtgtgtgtgtatgtgtgggtgancagtgagatccgtctcaaaaaaaaaccaaccaaacaaaaaaaaaaaaaaaaactcgtagggggggatccggtacccaattcg

SEQ ID NO: 78 - DNA, 1267 bp, Homo sapiens
ggcacgagctcactctagctgctatgataaacaagaagaccagtgaggaagttttgaaactctcctctgcaagagaatggtggccagccaggcgtggtggttgtcgaatctgtggcacctgtgggaagtgggctcagcccagggactgcctttggatcccccagcattggcaccatacctaccctgggccctaaggtggccatgcttctctggatttgcttccctagcaggggctctagtgcttgcccactccctgcccacagcatggcctgggagcagctgagactgggggccagctcatcccgcgtcgattcctggaagtgttatcagtgcctgttatggaggctggacccatgagtggcagccttccctggcagctgggctgacctgtctgcttttccattgctcgctggttttgttcactgtagggcgtgaggggtgagtagctgctggcctccaagtccatagctactcatgttgtacgctgttcacagggacctctaaggatgtacatcatcacacattcacacacatgcaccaggatttgctttttttggcagcttttcccttcctggcttcctttttgagtggtggaagtaaaataaaaagcaactagggctgggcacagtggctcacgcctgtaatcccagtacttttagaggctgaggcgggcagattacttgaggtcaggagtttgagaccagcctggccaacatggtgaaaccccgtctctactaaaaatacaaaaattagctgggagtggtggtgcacccctgtagtcccagctactcgggaggctaaggcaggagaatcacttcaacctgggaggcggaggttgcagtgagctgagatcacaccacagcactccagcctgggtgacagagccagactgtgtctcaaaacaaacaaacaaacaacaacaacaacaaaaaactgggctctggtggttgggaggaggagggaaggaagcaagtaccagggtaagcaggatggatggatggctctcccccagaggggcggcagcacacagagttctggagtcagactcagtagagggccagttttgactccactgccaaccacctggctgactccaggcaggttacatcactgatgaaagcctcagtttccttgtctataaattgggggtacaagcgatgaaaagaggctcaacatcactaatcactagggaaatgcaaatgaaaatcataaggaggtaccactttgtacccttaaaaatagttactacaaaaaaaaaaaaaaaaaa

SEQ ID NO: 79 - DNA, 1748 bp, Homo sapiens
ggcacgagtaaagacaaaataaattcttctgtccacttatttacctaacatacacttgcttccttggaagtcataggcatccacatatcttcagccacaacttggtatttctaatataattcttatttttgaactcctaaactttctggtagaaatcttcagttgaaaatatcctggcaagtaaaattagaaactcccagaaatgtacttatttctattatgttgttttatttctgaacattgtgcccaacattcttttccacatacttgcccaaattggaaaactagggttctaagtttccccctccatccatgcccacatttaattcaccctaataatacctgacatctttcaagttcattttctactatctatccccacgcaggccatatctgggttgaagcttcattatctctatagattaaaaacaaaaacaaaatgcatacaagcaaaacaaataacatacaaacaaaacccacctaactcatctttatgtagtcagtcctccctcaatagtttggccaaacttcctaaaccgaaatctgattgtgactatccccttctaaatgtatttaatcagcataccccttcaataaatccattaaccgttcttgttatccaagacagtttgtcatctgtcttggataacaagttgcagactccatccaatgccattttcccctagaaatatagataatggcactataggaacaatgatctccacatgcctcatgcattggtaatttttttaacctttgctagaaatgttctgctccactctactcatccaccacccattctactccaccttacactacctcttttcccatttagatcttccattctatatctccttgcatgaaattgtccatacctgcttagtactcatctcattattttgtcattgtgcgcatatctgttcatatgatttcttatggaagttattaagtattttgatttctgtttcagtcagatttccaacagagaagtagaaccagtagaaaatatatcttaagatacttattggagggaattaacttacatggttgtgggaaccggcatagccgacctaaaatttatatggctgactatcaaaaaagacaggctggaactcttaggcacaggcagaagttgcagttcacaggtgaaatttgttctttatcctggaagcctgggctctgctctttagatttagcagctgactgaatcaagtccacctagattacctaggataatcttgtttacgattatgattatcactaccagttatcaactgattttgaacttcattcacatctacaaaataccttcataggaacatctagatcagtgttggattaaataactatcagctgtagcctagccatgttgacccatcaaaagaccatcacaattgctgatataactttaataaaatttgcaacattttcagatggaagaattgagaaaagggaagcgggctgacttttcattttagaatttattatgcattaacttaaagtaagtaataattatgtaggtgatcattttgatattttaacctacttaatttagaaaatcatttaaaatcatttttgttaagactacaaaatgattttgggtaaaaaaaaattttaccaaatatcaagatcacaataatcacttaaaatagttacatatgtaactaacctgcacaatgtgtacatgtaccctaaaacttaaagtataataaaaaaaaaaaaaaaaaaaaaaaaaaaaaaaaaaaaaa

SEQ ID NO: 80 - DNA, 1324 bp, Homo sapiens
gacagactgttttttgcaagaccacattatattactttattattttctgctttttcttttaacgacattagtgtttttgatcactatattttaaaatgctttttgtgagccttttggttatgtggaatctgttccttagctctgattttttattcttatggagcgtcttaggttactacatgaaggtaagactgccacagtcccccagggaggcacactgtgttttactgattgatttgaagatgatagagagcctagggggatgagtctattggactcaaaggttacattttgtttttccatttaatttaataatcaacaaaacgacaaagtcagtttaatatctttcttctgctgagtcttcaggatgttagctagtctttcaaaagccattgctacaaaagtgcaaatttctcatttcctgtgggtctctasaaactctctcaatatttaaagccaaacaaatccatcttttctgagagacagaaactaaaaaattcagagttaattcactattaaaaacagcaaggccctgctatttcccaagaataaagaaatttaaaattctcattgtaagaagtatgaacttgaagctagaattggtttatttctggcagctacttacaatattaagaactttactttttaaatttgagacaatttcacaggaaagcaagaaattagtctattgtgaaatgtttttacaactaacttggaatatactgcaaatcactagtaagtagagacacatttaagataaaatgattaataaaacaattggtaattctgaataaggatctgaataaatccagatcacagactgttcctttaccaatatgtaaaagaatgtgcaaaattmgtaaaaatatacccaaaaatttaccagcaacagagaagcaaagaatggagttcaaccttacactataaacatctaatagatatgtatgaaaatttaaaaactagaaaaggttgggcatggtggctcatgcttgtgatcccaggactttaggaggccaaggtgggaggattgtttgagcccaggagttcaagaccagcttgagcaatatagtgagaccctgtctctacaaaaacaaacaaacaaacaaacaaataaataaataaataaaattagctgggaatggtgatgcacacctggagtcctagctactcagaaggctgaggcaggacgatcacttgacctcagaagtctgaggttacagtgagctatgatcataccagtgcactccagtctgggtgacagaacaagaccctgtctccaaaaattaaataaataaaacaaaaaaaaaaaaaaaagggcggccgc

SEQ ID NO: 81 - DNA, 1731 bp, Homo sapiens
cccgggtcgacccacgcgtccgtaaaattgaattttgcagactaaattattttataaggctgttgctattgaaagatcaattttgtctttacctgcatttaaaatggaacagctcttagcagctgtggtttttttttccatattttttttaaatttgttggctcttaagatgaataaagtttataggtgcatctgcctcctcttctctaagaatatgcatactaatgtttgtttctataaatcaaatacacatgtgataatatgcatgtaaatacataactatcctcatcatgtatggctctcagttcttaattgatgataacatgattgaattgccatatatctgtattacttgtgtgaatggttgtgttgaacacgctaagaacaatttgaattttattaagtacaaaaatccttaacgtttgtatgggaacattggcaagaaagaatagtgtgaaagggaactgttttagtttcctatcagtaattgtacatgcagttaaatgtttaaggtaaaatgattggtctctgtcacagctaaaagatttcagtagccttcattgagtttgggtaaaataagttgctgttcttttgtcttctttttaatatataaaagttatatttaaaaagtatataacatactatatatgttacatactaacatatatatacacaacagaaagtttattggatttagtactgatatttactgtctatttttgttactttgttcttagtaatctattatagttacctattttaaggtaaggtctgtaggcaagatatgtaagtaaaggcaagccctacaattttaaaataacaaagcttatgtcttaagttgtattttttcaaaggttcatgtttttctgagtaaatgtggtttattagcatgaaatattatgccttttacttaaattattttatgtaaaatagggcactgtttaattatgaaagggggaaaatcattccaaataagagtttaatttttattaattataaaaaactctgtattagtttcctagatgtgctagaacaaattaccacaaactgggtggctttaaacaacagaaatttattctcttaacagttccagagactaaatgtccagactcacaatgtcccagtgccatgcttcctccttaggccctaggaaagaatacttcctagcctcttcctggcttttggtggttgccagcaatccctgctgttccttagcctatagtggcttgactccaatctcagttttgttgtcaagtggtcttctaccctgtcttctatgtttgtatccgtgtccaaactctttttctagggagaccagcactggattagagttcaccatgatccaatatgacctcatcttgactacatccgcaaagaccctgtctccaaataaggtcacatttacagggtaccatgtgttaggatttgacatatcttttgggggacacaattctacccactacaggcccatatcttatctaggatgttggtggcaagaaggtgaagattactacctcttttgatataactagtttctgaggtatttaaaaatttggttttaaaaatattaagctttttgctcatttgcatgtatacttttctctcaacattgttttggtttatttaggttatttgttaaaacttcagtaaatactaaagttacttgtattagaacataataaaagtagagaattaaactacctaaaaaaaaaaaaaaaaaaaaaaaaaaaa

SEQ ID NO: 82 - DNA, 1466 bp, Homo sapiens
ggcacgagctctacctgaatgttcccctagagtttcatacacaatgtgttggaaacctaaatgtatccttctcctcagttttgtatttcagtgtgtggcatcatcaacatttgaccccctaggtagtgagagaccttggagtcaacctcaatgtcccatctccttccctctccttatcacagggtgttgttggttctctatgtcccgggtctcttaaaaccacctcttctcctccgcctctacagacaccaacataaatcaagtttccatcttcgtttgcctggacaagtggcaaggcagcactgaaaggatactccttcctctagtcttctctgccttttgcctactgagcccactcttctgagctgctgataaaggaatttacataccacacatcctttgatgggattgccatgctacaaagcagaacctaaatcccatgcctggacgttaggcagtctacattctggcttctgtgacttttggcctaatttttgcatcagccccaaatttctgttgtgccaccatcccagtggattctagaatttagtcttacacaatcattccatattcctttaatgagtcctttagcatttgttcattcctttcatgtgccctatccccgtacctggaattacttttcctcttttacttactcaagtcctgcaaaagccagttccattatgctggtctcactgacctctttctacatatttctggtaagaatgaattactttctcctgaaatacctctgccatattgtttaaaaattgccatatggtgctggacatgagtatgtgttcacatgtttattatctactctagtctcaatttctaaggtcttgaatataggaaccaatttattcatcaccttattccagacatgatggaactcagctttattgagaatcaagtgattatagtagatagtgaccatcctgagtatgttcatgtgttacataacaatgttttggtcaaccaaggactgcatataggaaggtgggctcataagattaatatggagctgaaaaattcctaatgcttagccatatcgtagccatgatattgtagcacaatgctttactcacgcggtgatgctagtgtaaatgctgccttaccagtcatataaatgtatagcacaaggggccaggtggggtggcttacacctgtaatctcagcactttgggaagctgaggggggaagattgcttgagcacaggaatacaagtctagcctggttaatgtagggagggcacgtttctacaaaaactaaataaaattagcctggcatggtggcatgcacctgtagtcccagctactctggaggctgagacggaaggattgtttgagtccctggaggttgagctgcagtgagccatgatcatgccactgcactccagtctgggcgacagagcaatcccctttttcaaaaaaaaaaaaaaaaaaaacaaaaaaaaaaaaaaaaaa

SEQ ID NO: 83 - DNA, 1303 bp, Homo sapiens
aggttaaatgcgtacttttctaacctttgttattttgaaagttattctgatattcctatccagttgtgcctcatttactagaaatttgctcacatggccaaatgatgtatccacagaacaatttgaaactagaccttttggaagcgaactcctacaaactgtcatcaatgttagcagaacttgagcaaagacctcaacccagccatccttgtagtaattccatcttcaggtggagggaaaaggtaacatttaaggagactggttgtaatttcttgattgggcctgctgggtggagtggcttaaagtagcatcagggcaaaaaaggtgttaggaattctatgtgatattaatattcatgcagttagttaagaagataaatgttttwatttttcttttgagcacaataacaagagctagacaaaaccgaatacattctgtgtacaccaaacttctatgagaagctaaaaaacacttttgatttcttctttctcatcatacctgaatttcatcctttggatgtgcttttacagtaaaatttctattaaattgaaattttaatattcgttcagacctaaattataagattttgtggtatgtattagtctcatctgtttaagatggtgcctaatgcagataatgcatcagtacagctctgaaatgcttgtagctatttttattactgatcagaagggggaactgtaatcatcttgtgaagggacagttttctaaggctcaagagctcgaaaacaatctcaatcatttacagggttgtgatcatttcacttgcattaagccaactaaagttgtatttgtaaaagtaatgctatgaatattactatttgacctagacacataggttagaattggaaacacaggctataaagtatagtaattgtgtaattgtgaaaatattaaggcttcaactcaaaactgaaacacagtagggcttagaaatctttgaattatttatacccctcagtttaaaaacttccagtccaggcgcagtggctcatgcctgtaatcccagaactttgggaggccaaggcaggcggatcacctgaggtcaggagttcgagagcagcctggctgacacggtgaaaccccgtctctactaagaatacaaaaattagccaggcatggtggtgggcacctgtaatcccagctacgggggaggctgaggcaggagaatcacttgaacccgggaggtggaggttgtagtgggccaagatcatgccactgcactccagcctgggtgaacagggcaagactctgtctaaaaaaaaaaaaaaaaaaaactcgtagg

SEQ ID NO: 84 - DNA, 1516 bp, Homo sapiens
ggcacgagaggaattgatgctttaatttttggatactttttcagaatttttaatttactatggtccggcctaagatcctctgttgtatcaggttttgtgcacaaaagaaaagcacaaaagttgaatgcacatggggcatgtgctttctgtgcaccaaatatctggatgaggttcttttttcaggcctacagtcaaatctgtgtccagaattttttgacttttttgctttgtataatcatagaattcattgctgctgatttctataatgattcatgttgtcatgtgtctcttaataactgagggctgtcagtaacctgtgattttgccttttctatagtcttactcccatgaagaaccttggttctgatggagaaagtgaaaagctttatttcttcccctagatatctttatatttctattatattttttagttgtgtactgtgtactagagatttttttcagtttgttatgaacacaatttggtaagccctaaattggttctgcctgtctccaaacagaaacatctgtacaaatcttgttggtatagactactttctggaaaatggtcaagataagttcatgttttcttgaaatttctaagatagtatatggtatcacttgtttaaagcaaatcagactgagtttgacatttaattcaatatttctggtattcagtaacgggtatatatgtttgttcttccagtttgggtcagtttaaaagatatgttgcaaagtatacatagaaaatgtgagcaatgcctctctttgccttttgatcagaaacttcagcagagcggtaaggattccacatgatttaaactgaaatgcttttctttgttgctgtaagaacttaaaatgtaaaatacctttttcagtttaagtcctgtaaacaacattgaagcatggagatgaggcaaggaatagtactcactgaagttgaaatgactgcccacttcaaaatcttcattgtgtttacacaccagtgtatttatacaaatcagaggcattttgtagatgctttgctgacttgttcagctctgtaaaaacacagaaatcagacccattttgtaaagcggaaaatcatgttacatggaacatgtcctgtatatatcacatacatggtaatggagtcttaatgataagtgcaagataataatttaatgatgggattagtctgatcgcttaatatgcacaatcctggaagtgaattacttgcatcagatatagtgatatttattattctgtacagagagaaaaatacatataaaacatatgcttacattacatgcacgcggatttcatgctccataatcttttctattttttaatttacctttctgtaaatgatgtgcatggaatatgccttatagaaaaatgctgttcataatttgactacgtggaaaagtgcctatatggtggtaatgctagtaaggcaaataagacaaattatcatgttggtttactacatcaccagttaacattttatattgtgatgtttaaaaaaaaaaaaaaaaaa

SEQ ID NO: 85 - DNA, 1689 bp, Homo sapiens
actatagaagtcgcctgcagtaccggctccggaattaagggtcgacccacgcgtccgggctaattgtttggtcagaaattcctaaggccacagctttggggggttcgtgtagatgtacatggtgggtgggttataaatattgggacttaaggcagcttgttctatgtatttatctttgctcttgggtgacttagggaatgattttatttgatttaaccttctttctgtttgccccgagaatactcgccagtggcgcttgcagttgtagcatttaccccaagataactttgcctacgaaatatttcgcttttattatttycacatcattctagtatatggactttggaaacaaaagacattgttctatttatagcattctttttttttttttagtagcggtatttccatttacaaaatatagtaactcttgattactgaaaatgtcaaatcctagaaaacgtagcatgcctatacatgatgttaacatcattctcgaacagttgttggccgaagattcatttgatgaatccaatttttttgaaatagacaattctgatgttctctttagaaataactcagtttttatcttttttcacattgaaaatcagttagatttgcttaagcctcaaagagaatgtttatgtaaattagcgctggcaatttttttttttctaaacaggaaaagggttaaatgaaggttgataaaatggatgttcaattgtctttctgaaagtgagtggcttgaagggatgaataaatattttcttaatatattcaaaaaagtgcattgctttctgtgatggaagttaagacctaaatgtctggaagttgtaaccctcaacacagcttttcctgatttgctgcaaaggcacatagctgattatagaagtgaagacggcaaggacggggactccaacaaaggaaaccctgttgcaggatttgggaactttcatgcttcagatgaaattcaggcatgtgagcatcactgcagaatgtggtgcatcattgccatcatgagtaatcacttgctgctcctacttctgagaccaagactcttttgtcatattctttagcaataggacgggtaaagactggatttaattgctgttcagagtataaaaactcaattgattccaacatatctgaatgtgcagtaaagtcttaaaagtcaaccgttaatcattaagtcttttgcctctaaagtcttttgcctctgaagaagtttattacatgagttgattttcatattttcattttggtggggttttcctgttgttgggcaaggtggggtcacaggacatgggactagtaagcattttactgtttactatatttgtctttttataaacagtatctcccaaaatgtgattagaaggctaccaagcctgtatttggacatttaattgtgtgctttatataatgtaactactaacagtatttggactgcctgttcattcctggagacaaaaatgaaaatctgtcagttcaagttcttgggtaacatcaagtcattagaatttatctaaagcttatcatgatttgataagacatccattgcatgcagctgttttagctcagtgcaaaacactgaaattgtgattcttagactgtttctgagacatttggatggaaataaatgtataaatgttaaaaaaaaaaaaaaaaaaaaaaaaaaaaaaaagggcggcc

SEQ ID NO: 86 - DNA, 438 bp, Homo sapiens
ggcacgaggcaaatgccatatatgtttagaccagcctttctcaattgtggcacttttgccatttttggccagttaaattctgttgtgggggctgtcctgtgcattgcaggatgtttagcagcatctctggcctctacctactaaatgccagtgcaccctccctgcagttaaatgaccccaaatgtctccagacataggcaaatgttccccggagaacaaagtcatctttggttgaggaacaaaatgaacctatatttaagatggtctaaatgtttctgagatggtctaaacatttataagcttaacaattaacttgaaactcttcaggactagagaagctatttgtaaatttaaacatctgacgccttgaaacacctttatcataaagataactaaaccagtgttctttgtgaatggccaaaaaaaaaaaaaaaaaaa

SEQ ID NO: 87 - DNA, 5278 bp, Homo sapiens
  SITE (11): n equals a,t,g, or c
  SITE (17): n equals a,t,g, or c
  SITE (1322): n equals a,t,g, or c
  SITE (5275): n equals a,t,g, or c
ggcacaggganaacganctcaggaaaaggaaactcctctgatcatgaagggtgttggaatgaagaaagctggacatttagtcagagtgggaccagtgggagcaagaagttcaagaagacaaagccaaaagaagactgtctccttggctccgcaaagctggatgaagaatttgaaaaaaaattcaacagcctccctcaatatagtcctgttacatttgaccggaaatgtgtacctgtcccaagaaaaaagaagaagactggaaatgtgtcctcagaaccgactaaaaccagcaaaggtcctttccakkctcagaaaaagaacttrttccrcaaaattgtcagcaaatrtaagcacaaaaaggagaagcccaatgttccggaaaaaggaagtggggrtaaatggtcmaacaagcaactcttcttggatgccattcaccctacagaagccatattttcagaagacagaaacaccatggagcctgttcataaggttaaaaatatcccatccattttcaacactccagagccaacaacaacgcaagaacctttggtgggcagccaaaagagaaaagcaaggaaaaccaagattacacaccttgtcaggacagcagatggccgggtatcaccagcaggaggtactttggatgacaaaccaaaggaacaactgcagaggagtctccctaaagcaactgagacagactgcaatgacaaatgctcacacaacaccgaggtcggggagacgcggagcagwactccagaaatgcctgccgtgtctgcgttctttagcctcgctgcgctggctgaagtggcagccatggaaaatgtgcacagaggtcagaggtcaactccgctcacccatgatggacagccaaaagaaatgccgcagctgcctgtacttatttcctgcgctgaccagtgaagcgccctttcattgtaaaacattgtgctttacctactaccctagccttgtctttaccgagggatgctagtgagtccaagtggtggaaaatatagactgcaaacaagtgcttgttgccccacacggcccagattcacttgaagcagaagttagcatcctgggccagtttgttctctcagaacccagaatctttgagggtaaggttatctgtctgatactgagcagaaacagaatgatcctggagctttgctttctattgaaggcttttgacggtaataggtggtaacttggtaaaaggctgcctttactgtagctcacccagcatctcttttaccaaccagagagtgtgaaactagtttcatatattacctagttattctttcaaaacaaaacaaaaaaaaaanaaaaactgacgcactgcactagttattattagatattcttagtcttttttgtacatggagatttaagtttaagatggtttatataataggttatacctacatttatattgtagaataaatattaaaaagcctgttccagagactcccaagcagcctgggcaggcagatgtaccattgttagtggtgtatgctcggcctcgtggtccatatattctgcacttttatatttgccaccagaatggtagtttgctggcaaaaaaaaaaaaaagagagagagaaaaaattacaactcttacaatctgaatttttttcttagccttgagtgaccaagaagaatttgcttgaggcaaattgtggcaaatattttcccagacaggggaagagtcctgcagattacagattactggtgttttcatgccttgaggattcttttatttttacataggggtctaagtgaccaatggattgttcatacaaacaaaaaaaaagacaaaaatattattcagaagtgaccttagtattacttcactattctaaacacattgaagacactcacttcatgtggacttggagctacagaccttttacatccatcacagattggctggacgggttgcaattgctatgcacagcctgattggcactgcaggtttttagagccattttgagtttgtgttgtttaggaggtactgagtcaatgatgagggaggtatgcctgaccagagtgggactctcagtcatagatccacctgcaagtctctgtttcctttttgtgttttgktgcttttgaacataaaaccaaccatacataagcagcgccaagtggattaactggcttagaacattcaacatattgacttaaccacctgacattcacagtgtcttgtttcctagcaacagatgcaaagtgataaatcaaaattagtctgaggctacagattttacagggtatttgttctatagcacaaagtatttccccactcttgcgtcacagcacaaactaccaaattttaattattggattccagcaataatttttaatggktttcaaactggcggaattttgacagtgctagttcgagkttgaagcttttgaattagatctctwaatggkgacagkttacatggttttawctagctttcttawttatacttgactgaattgtaatgattttttttctaattgtaatttgacgtaatagccatacaaaaaatgactctattcatactaggtttagcttctcatggttgtagatattacttcagttccggtgctggaaaatatgtacaacatactaacaggattrarrraaaaatagaggtttttcttcttgtttttttttccaaagcaggtaaagagggtagcaaagcatcggaatgatgtgctcaaaaatgcatattcctggtggggatggaggaagaaggcattagtaaaaggttaatcaaacgttacaacttaaccccattcatgyaggaataaatcaagtgagcagttccagacttttgcataatatttttactatgatgctgttttattaatattttctaaatttcaaaacaaaaagtgaatgtttgaaattgctgggtcccgatgttggtggctgttggagttttggaccactcgctagcagtgatttgaagattataattagctaaaatccaaaacaaaaaaccaacaacaaaaattgtatggtgcggaacatgcaccttgacaatggtactaacttgttattctatagaacacgttagaatagatctatttttgccagagcaccctccttcagtcctccgattacatttcactagagttccttacgagattgctgtatattcctgggaccttttttaaaaaaaaaaaaagcaaaacaaaagattactttttttctatgtgattaatatcttacttgatctgcttttcctaaacctcagtggcttttcccttaggcagggttgggggtgggagggcaacttactggagatgactgttttcagatactttaaaacaaacctttttgtagaaatgcttaatttttaagcggttaggcactgagagtagcagaaatcctgcaaagctttatagttccttagactcaccttgtcgattctctgagtaaagtcttgatttcaataattgtgcttctcatgccctgaatctgctggagaggagtgttgttattttcaggtaacaacattcgttagcacaaatatttcagaccaatattagtgctctccaccccaccttttgttatcattttcatttcatttctctcattcttttttattttggaaaatcatattgctatagtgtgtactttaatctgccagcagataccatctacactaacatttgtcccacagcatcctcaagagaaaaagttgttgcaccttatatatatctcaagcaaaccaaaatatgatgctcttctgctttgttttattctaaattgttgtatcatatctttctgaaaccattctgaatttagttgaaattatcaatatttatgcttttaaccttaatttctggattcaagcctgtatataaatcttttgaaaaaaaattgtcctagcccttctctgcgatgctggaagtagaagattgcgtctcagatggagacgcagtactgttccagttttctttagccttttatttatttagttattctgggtatttcctatgtaattttgaagtgtgtagagtatattatagtaactgaagctgcagctgtaagaagctgagtgaaagaaaaaatactgtaagacatccttaaagtttttatttgtttgggtactgtatatgagatcaggaaaaagaaaaatgtcccacagccacattggaaatacaggttcttgtccccaaattaggttagttcccagattttagatcaaaactgttaattcattaaaaccccttttaaaaggtaaattctactgttgtaattccgatagtctttttcccacaaatatcagaaatatatttatttaattctgtcagatgagctttctaccgatgccatgtcccaaagccatgttaaaataattcccacgttatcattgtgattctacttcctgccactaaaattgctggagaaacaaaataatgatggaacactatgaacaaaaaggagcatctgaactggtctggttatttagaatccaatgtgttcaaatccttttgttttcttattaagtcagatgctactgtaagtcagataaaattttgtttgcactctgcagtctttggctcaatgtatggaaatgtttgcacctatgtaaagtcacaagctaattacaaattgctacagaacaggagtaagctgaaaactgaatgccatgttttgtttataaggtggggaggggagggaaaataccaaaaaactctgttccaagtttggcatttgacattaatgtgaagcagtgggaccatgctgcctgctaaactactgtatgaatcgtaaatgttctgaagacgagcagctggaggctggaggatggcattccatacagcaaaggagaagcacccaccacttcatctgggaaaaggaaggaaattgcaggaggcctggagccatcatttgtaaaggggatgttgcggggtgtgatgctgttgaggagattcaccttcaattgcactgctccacagagccctcatataaggccaatcctaatgggctacctcggctttaaaagttaatttcagtaagtcctgtttcaaaagtttgtctttttttgcttctaccttcagtgccactattttccactgcagtgttttgacttcacaaactgcctcctccagagaggaacaatgtattgctgaaratggggcagtaggaaggcaaatgctgttgttacatttggacctattaaaggtatttcagagtgactgctagggtaggaatttaaaacttaggctttccccaataggctccttatttttggcaccttattaaaaggtntta

SEQ ID NO: 88 - DNA, 734 bp, Homo sapiens
gctcgtgccgctgctgggcactgggagcagggggcggccaaaggcagtgggtgggcaggtccatgcctcccctggccccccagctctgcagggcagtgttcctggttcctatcttgctgctgctgcaggtgaagcctctgaacgggagcccaggccccaaagatgggagccagacagagaaaacgccctctgcagaccagaatcaagaacagttcgaagagcactttgtggcctcctcagtgggtgagatgtggcaggtggtggacatggcccagcaggaagaagaccagtcgtccaagacggcagctgttcacaagcactctttccacctcagcttctgctttagtctggccagtgtcatggttttctcaggagggccattgaggcggacattcccaaatatccaactctgcttcatgctcactcactgaccctccctccctcctgggctccaggtcacaactcccaaaggagatgcaggcatggctctctgcctctgatcaccatcactgtatctcaaggttcagcagcagagataccagttgccatcagtgctaactgactgcctctccaggttcggagtttcatctcccagggccagagacagcagacccacatccttctctcccacacctctcctggttttgttcaggacagcagattagaggcaggaggcaatgacaataaaataacgataaaatcctgagaacaaaaaaaaaaaaaaaaaactcgag

SEQ ID NO: 89 - DNA, 1346 bp, Homo sapiens
  SITE (707): n equals a,t,g, or c
  SITE (998): n equals a,t,g, or c
gggcagmgyaaacacctcttcttataaacatggccctgctttagcaacaggtctccattatgaagcaatttggatttggacatcctatcaagttacttaaaactaaactctgccgtatagtgttttacttggtattttttgtgtggccacagtctagtgtgatcagagaagccacacagacataaattcccagtcctgattccattgattattagatatgtacttaccctgaacatctgtaagatggggagtaatgatgtttaccacaaagagttagtgtaaggattcgatgagagaacttgcatttgagccatctggagagaatgttagttttagcactaacgatcgtttataatactgctgaggaggaaggactgacatcaccctgcttgagaatctagtatatgttgggcattccytatccattcatgagcctgagagtacttgagawgttttgatcttggacactgytgtgcagctttaaggatgatgagggggaaatggaaagagtcytgaagggaccagtgtcagagacagatagaaaagggctgcctgagccgggcgcagtgactcacgcctgtaatcccaacactttgggaggccggggcgggtggatcacctgaggtcgggagttcgagacccgtctaaccaacatggagaaaccctgcttctactawaaatacaaaattagccaggtatggtggcanatgcctgttaccccagctgcttgggaggctgaggcaggagaattgcttgagaggcagaggttgttgtaagccgagwtcgcgccattgcacgccagcctgggcaacaagatkgaaactcccatctcaaaaaaagaaaagaaaagggctgcctgggtccctgggaagacccagctcccctctgtatcctagccaactccttaagtgcacacaacctcagctgaccacataggtggcagtgatagcaaatggtgaggtgggtgggggtgggggtcctgcagctcactttctgtnctgcgtaataagggagagatcagagatgcatagacttttaaactggtacggttcttagagatggtccttggccttctgttgttgttgttgtttttttctttttcttcttctccttctccttcttcttctcttctccttctttcttcttttttttttcagagtcttgctctgtcaccaagactggagtgaagtgatgtgatctcggcttactgcaacctccacctcctgaggtcaggagaattgcttgagaggcagaggttgttgtaagccgagatcgcgccattgcacgccagcctgggcaacaagattgaaactcccatctcaaaaaaaaaaaaaaaaaactcgtag

SEQ ID NO: 90 - DNA, 998 bp, Homo sapiens
ggtgtcctgcccgtttttgtccttaatggccgtgttgattcgataggaatcgacagatgggagccaagaggggacgtaaccacttgccagtgtggcccagtatttatatggtagaagctcgggctggcattgagatggaggtgggaaagaggagggtgtctcgtgtttaaagatttctctcttgtgtggtccttggttatggctccccatggtgcttgctgctcccttggtcgcctttccttgcattttgctttttgcctttagtccttctgcagtcagggaccatgttggtgactctcggtcagatgttcccatatttgcatgtcttgctttggcctctctggctctaggttctgtattgctagttgctttctgacattttttctcattgtttgtgctaccttggccaagaacctctttgccttctccctcgtttgtaacattgagatcctagtagcagttacttcttagggttgttaggatgacatgagatgggcgagttggccatctgccacacaagagttcccttctcactgccatcctctgcccagggtgttccccagaatctgcagggccccattggtcatcttgctgtctgcacaccttcctctctcacctcttggcacttccctcaaaaaagagagaagtggagcacagtaaataaacgccagcgttttctccagttcccagcacctctccggaactggatcccccaaactcctctgtcactttctgtgtccagcgggcccctggggtccttcactgtcttcactctgctcagcctgtgcgcttggccttggtgctgtagggactgttataagagctgctgtccgatccccatattcaatctcacagccccactttgtgtacacacaccagagccatcttcttaaaatcagatcctgtcactcctctccctaaaatctaccagtggtctaataaaatcttgaatttttagcataaaaaaaaaaaaaaaaaaaaaaaaaaaaaaaactcga

SEQ ID NO: 91 - DNA, 566 bp, Homo sapiens
  SITE (68): n equals a,t,g, or c
ggctatttaggtgccctatagggaaagctggtacgcctgcaggtmccggtccggaattcccgggtcgncccacgcgtccggtcagagagaaagaactgactgaaacgtttgagatgaagaaagttctcctcctgatcacagccatcttggcagtggctgttggtttcccagtctctcaagaccaggaacgagaaaaaagaagtatcagtgacagcgatgaattagcttcagggttttttgtgttcccttacccatatccatttcgcccacttccaccaattccatttccaagatttccatggtttagacgtaattttcctattccaatacctgaatctgcccctacaactccccttcctagcgaaaagtaaacaagaaggaaaagtcacgataaacctggtcacctgaaattgaaattgagccacttccttgaagaatcaaaattcctgttaataaaagaaaaacaaatgtaattgaaatagcacacagcattctctagtcaatatctttagtgatcttctttaataaacatgaaagcaaaaaaaaaaaaaaaaaagggsggccgc

SEQ ID NO: 92 - DNA, 1277 bp, Homo sapiens
ggcacgaggaataatcctagctctatctgcagggttttatcgtggtttccctgagtttaaacatgtaacaggggagcagaaggagggataaatgatttgtttatgctcaataaagatgttgctgctgttctgtcagctaacctttgctctcataacctgcataaacttgcaaagtctttatttattctcctaccagcaaattattggaattcatagtcatgtctaattttagttagcttagggatggcactcaacagggttataaaagggggagaacatctctctcattcctgaatttccaaggctgggattacggtaaagctgtgggagatcacagtaattgaggtttcccaggacactcccatagtgggttatgcttcccaaatctggctttctaagcataatggaatctggcctaacctgtcttccaatatttgagtctcttctatagcacccctgtcagagtggtttgtgttcttcacttgataaaaacttttttggggatgcatcattacagtttgagccaggtgatttcatcttcaggcagctgtgatagataataatacacaataaggaaacaacgaaacactttttaatggattagtaagtgggaatagatagggcacctgtcatttcattgttgtccgcatgacctgatgaggtagttaactgttagtgtcacttccattttcaggccaaaaactgggggcttggaatagtggagcaactccggcagtgccacacagctatgaaatatcaggtcagaaccccagggatactggatccaaaaacctgagaggaagctatatatcctttaacttcttcacccaaagctgaaatctgcttcctagttctatcctccaatgacccaaggaaaagaatctcttccgctacttgctcttcagatatttaacacaactttcaggccttcttttgcattcttttcaggccacaggacactgtttttcggtgttcgttcccccaacccccccaaaccacgtatttttctcatttggcttattgcagtagctctctaaaggtctgcctgctctgttccctattcttcacccagcagccaaggccacgcttaaaatacaagtcaaatcacttcattcctctgctcagaacacttctgcagtttttcctgtcacttgaggtaaaaccttaagtcaacttgaagattacagaattgaattgtcttactgaaattacctttccaaaatcgatggttcccaactcgtgccgaattcgatatcaagcttatcgataccgtcgac

SEQ ID NO: 93 - DNA, 1570 bp, Homo sapiens
  SITE (7): n equals a,t,g, or c
  SITE (8): n equals a,t,g, or c
  SITE (10): n equals a,t,g, or c
taccggnnanggaattcccgggtcgacccacgcgtccgattttatgctatccagtwtttacgtacccatgtgtcaacatttcatatatccagttctttgggtgctggttcactttttttcatttattcaaattcagaaaaatacggacggatctaatgttaaattaaccagaaaccctggaacattcatatcttgagagggaatttgctactcttttacttttgggatttcattataaaataggctcattttatacatatgtcctgtggtctgtcttccagagtgtgctgtaatcataagtctctagcaaagagtggagggtggagggtgtgtagaactccactcagcctcatggatacatctacaagtctctcaacccatcctgttacagttctccatgagagtcacctcacacttggaaaagaaggaggtttaaagcagagtattgttggcagccagctatgcccatcctcttgtaaataactttccaacacacccatttccttgccttaaggtgcaggttcctacttctacaaaatttcaaatgattgcaggtcaaaaacctttggagttactcacaaataataataaaatttcaaataactagggtctacttgtccatcaagatgacattaccagtggaacccacctgttaattttaaagtagcttcagaacccaacaaaaattatgtaagcctggttaaatgtccttttttcttcttgcctctaataraatcaggatcttcggccttgatactaaatatgtgtatatttagttatgatggtacttgtagatgctcacatttccagttccaaactcgcccgtactttttatgtgcttcaaaatattggacacatttctgttaatatatgatttctgtatccacaaaccgctgtttgcttatgctgagtcaatttagaagttaatttccaatctagtctcaactgcaatgcatttaaaataggtaaaacaagtaaatgagtttgggacattttgagattaatgttactgcccacttgactgtcaatttcaaatggctcctaatgcaaccaaaattataaccaatgtagcatgtgtaggaaaggtatttttaattatttaaaatcattgtgtatattacagcagtatgaggaatgcctggctaaagaggattttttaaaagatgaagaatggttttgcttgtattatataggcttactgagtttgtgagcagcataaaaacaatcattccttaattcttcattgtggaactgaaatatttctgkaatgcattttttaaaaggagactcctagacacagcygtaataggggaatagaaatgtagagcttttctcataacacaaaaccagaaaataattttcagcactttgacttactctatgtaataaggaaaaaaattgtttccacaaagttgaactatgtagtaatatttggtaacatatggcatggccactttatatcacagaatgtgtgtcaagttgcaaagcatacttgggccatagtagacactaagaattaaaactcttaaatcagtgaaacaaaaaaaaaaaaaaaaaaaagggcggccgc

SEQ ID NO: 94 - DNA, 524 bp, Homo sapiens
ggcacgagcggcacgagcggcacgagacggcctcccctccgccctgcggtcccgcgcggatgcagatctgtggatccagcgtagcatctgtagcagctgggacatcattccaggttttgggcccggtgtgttggcaacaactggatctgaagatggcagtcagggtgctttggggtggtctcagcctgctccgagtgctgtggtgtctccttccgcagacgggctatgtgcacccagatgagttcttccagtcccctgaggtgatggcaggtaaaactccgcatgtgtggctgagacaagctgcagcagagtctgcttgagaagctgacgggagactttgtggggagggagtagcatgtctgggtagatgagtagtaaatccacaagcagagcagcagcctctctctctggggtaagaacttggaagtggggacttcatatctccttcccgagtggtgacactgaccttctgggtaatgctaataaaccaccagtctctttgatgtaaaaaaaaaaaaaaaaaa

SEQ ID NO: 95 - DNA, 1306 bp, Homo sapiens
gaagctcgaaattaaccctcactaaagggaacaaaagctggagctccaccgcggtgggcgggccgctctagaactagtggatcccccgggctgcaggaattcggcasrrggcaagctgagatcttcaacgcttcctacaagaagtacctagatagggagtgggaggaagagccactcaggaccaagactctgccagcagctctccttgccagggagtctacatggctctgaactcgtgtgtctttctttcccagtacggccaccttctatttccttcttcctagctgcctatttgcaatgccaccggaagtcaagggcccctcaggcaaggagaatagcacttcataaagagaaggatgatgaccccgagggtgtgtggccctgtgctgcgcccattgcagtctctcagctcagctgctcctcctcctacctggtgctggcctgcgaggaatggtgtgctcacgctgtgggacctggccaaaggattccctcttggggtcgctgctcttcctcaaggatgtttctgccaaagcattcacttcctaaaatatttctcggtccacaaaggacagaatatgtatcctgaaggtcaagtgaaatcccaaatgaaatgtgtggtgctgtgcacagacgcctccctccatctggtggaggctagcgggacccaaggacccaccatcagtgtgcttgttgagatgtgctcatcttttccaagaatggctctgtgtgccttatggatgtggccaagcgtgaaatcatctgtgcctttgcccctccgggagcctttcctctggaggtcccctggaagccagtgtttgctgtgtctccagaccatccatgtttcctgctccgaggcctgcccactcctggaaaatatctcaaaaaattgtaccattcctcaaagggacttggataacatggccttcccccaagcactgccactggagaagagatgtgagcgtttcctccagaagagctatcggaagctggagaagaacccagagaaggaggaggagcactgggcccggcttcagaggtactccttgtcgctccagagagagaacttcaagaagtgaggctgccaccgccctgggatctctgaaaaggaggtttcagccacgaggcagctgcttccaggacactgaggccaagagaaatgtaacagarccacagctccacaggcctgcactcggagtctggggcctctgcagaaccagcaaggggaaaagtataatctgggggaccttcaaccactaagcctcttgtcagaaccctcaggcagggcagatgtgtcaccaaataaaac

SEQ ID NO: 96 - DNA, 1479 bp, Homo sapiens
acgsgaagctcgaaattaaccctcactgaaagggaacaaaagctggagctccaccgcggtggcgggccgctctagaactagtggatcccccgggctgcaggaattcggcacgagcttgtttcatgcccttccaattacctctccagcttttactacttaggttaatttgtgaattctttcttgcccctgccttaaattgtaatctcactgggactgtgattttctttacactcatgatttctttacagctcatgattttctttacactgcagtttgctgatggcttccaaattggtgttgatcttcagctttcagagttgaatattctgtaggtggcttcatatgtcattcattccgtcttctcagtttattcttaaatatgacccaactccagcctttatcccaatttatactacctctgtcctgattcaaggcttcattatctgtcacctaaatgtacttgaagctgtagtgccctgcttcattcttgatctcttcaaatctgcttttttataaggccagcaggatgctttggcaaaaatactgatcttagtgactggtctttttaaaagcagaaattatcagatctctgataagaatccccaagagtaggataccttgaagtctattttgtatacaagttcattccatacctgcagatctggttttaatcagattgagaaacttgcagtctaccagaattaagtttgagcccctctgcctggtgcataaagtcctccatgacctggttttgctttacctgtagttcacatttcccactatggcctaatttgcagcagtattgaagaacacactctcttactgtcctgtccccctacctgctgtatcctttgcatagaataagtgccattctcttccagtctacataacgtaccttcacttttttttgtggcagctgttattgcactttgcaacatttgccaaaacgtttctgactccccagcctgttttatagtaacactcatatggacaccttgaaaatttataaaatattatttcattggatgagaaaatgaatcaattttaataaaaataatttacaccaatgttaacattaaagattgcactagagttcaaaattagtatatttttatgtttaaagaaattttaggccaagtgcagtggcctgagcctgtaatcccagcactttgggagactgaggcaagtggatcacttgaggtcgggaagttcaagaccagcctggctaatatggcaaaaccccatctctactaaaaatgcaaaaattaacaatgcttgatggcaatgcctgtaatcgcagctatttgggaggcagaggcaggagagtcacttgaacttgggagttgccgtgagctgagatagcgccagtgcactccagcctgagtaactgagactcctatctcaaaaaaaaaaaaaaaaaaaaaactcgagggggggcccgggtacccaattcgccctcatcagtgcagtcgtattaca

SEQ ID NO: 97 - DNA, 1794 bp, Homo sapiens
ggcacgagaagcatttagtaggattttaaagaaacttgagaactgttacataaggtgatgaattgggcatagcatgtaaaattatatttaagcaaggaaatgatctctggtgttttaatattcaacttgattgcttcctcttgggttctgtgtttcccactgtgtgacctgagctgtcagaaaaccttaagaattttctttgcatcatttttccatgcagtttgtgtacatgtctcatgtacctcgtggcagccactggttttgttcatcaaatggtgggttgtgggatgctctcctgcagtctccctctaattaaagaggttaaattgccgtttgctcagcctttagttcctttccacagcttcctaggctcttaaaaattagcactatattcctttcagattaaaaaaaaaacaaaaacaaaaacctgtttgctgtctttactgctgtggtcttgtctagagcaaatctgaacaaactgattgaaaggggtgtttggtggctggtgttctctttgactaaagaggcttacatgtactgtggtacagtctgcttacttaaaaggtgaggcttgaattaaaatacagccagatagaagccagactctaatcaaatgaggtgattagatcaatgaatgaagagaggagaggagtcaggtgttgcctttccctggctgttgaatagctgatgttccagattgccctacagtgttgtgttagggcatccaggagggatacttttcaggcttaggtacacctcagtctttaaaatgaggaattaggacacattcatgtgtgtgtccctaatctgctcctgagaagagaagtgcaatcagggtcttattttgtgaccactgacttgcacactgagacaaaagggccatctgcaagctgaaaatagtggattccttaaataaaaactattcacatttgatggtgtggtagttttaataaaatgttcaagtgtcaagttcattttcatttataatctgagacagttttataagtcacctccctgggggtaaaaatgcatgttctgtcctcatagtgagacacatcttctgcttagagtctagaaagctctaagaaagatttatgccatctgtgcagctggcatttttatagtaaaattttttttactttgctccaagtttaagttatctcatgacaaactttcttgaaagaggcattcactattattataggaagtatacttctttattgaaaaggagataatgtatcaggtaacttattaaagtattttctcaaagtttagtatctttaggaatacagtgcctcaatacaatataaaatattttgtaaataatagaatgaattcattttagaatttaaatgatgctaataaaatagaccattattctaaaagtttaactaatttagaatcaaccctggttgaaaataaagccttaagctgtttttttggaagactttaaatcctttatggctaagagatgacagacagggccgagtgcggtggctcatgcctgtaatcccagcactttgggaggccgaggcgggcggatcacgaggtcaggaaatcaagaccatcctggctaacacggtgaaaccctgtctctactaaaaaatacaaaaaaaattagccgggcgtggtggcgggcgcctgtagtcccagctactcaggaggctgaagcaggagcatggtgtgaacccaggaggcagagcttgcagtgagctgagatcacaccactgcactccagcctgggcaacagagcgagagagtgagactctgtctcaaaaaaaaaaaaaaaaaaaa

SEQ ID NO: 98 - DNA, 1943 bp, Homo sapiens
  SITE (161): n equals a,t,g, or c
  SITE (1926): n equals a,t,g, or c
  SITE (1928): n equals a,t,g, or c
  SITE (1934): n equals a,t,g, or c
ggcacgaggcttggctaaggtccgcgggaacccgtgagccaccgagagagcagagaactcggcgccgccaaacagcccagctcgcgcttcaggtcccggcgccgtcgcgcactcctccgatggccacagatgtctttaattccaaaaacctggccgttcangcacaaaagaagatcttgggtaaaatggtgtccaaatccatcgccaccaccttaatagacgacacaagtagtgaggtgctggatgagctctacagagtgaccagggagtacacccaaaacaagaaggaggcagagaagatcatcaagaacctcatcaagacagtcatcaagctggccattctttataggaataatcagtttaatcaagatgagctagcattgatggagaaatttaagaagaaagttcatcagcttgctatgaccgtggtcagtttccatcaggtggattatacctttgaccggaatgtgttatccaggctgttaaatgaatgcagagagatgctgcaccaaatcattcagcgccacctcactgccaagtcacatggacgggttaataatgtgtttgatcatttttcagattgtgaatttttggctgccttgtataatccttttgggaattttaaaccccacttacaaaaactatgtgatggtatcaacaaaatgttggatgaagagaacatatgagcacatgagttaagattgtgactgatcatgatttatttgaagatggagcactgctgatttatgaaggaaaaaagaagaattttctaaagattacacatatttcagaaagactttacccaattcagttgtcagacataatgatttatttgaaggcttgttttatttgaagaaaagcatattgccaaaaattctggttaaaagcttcctaacgggtaacagaccatgggagagatatgtggttgggtaatgcaaatgtagttatacaaagaaaaatacagatgtctccagacctgaggactttttaatagggcagttgttgtgttggtggcacattggatatttctaacatgtacaaagctatgtattttgatttactttcatttcttgctatgtatatgtacttttcttaaaatgccaagaactttctcttgctatcattgctccttttgaaacaattcaattttcatgtctacagctgactgttttgttaagattgagtcatcgacattcaggatttaagtctgaggtagtcaaccctcaggaaaaaaaaaatggcttatctgaaatcagtactgtggaaatgaactatattagctattatgaataatgtccagtataagaatatgcttctggaattgagttctccttttaagtaccaatgatacttaaatttctcagaaatgtaatggtgtgtcattgccttgaaatgcttgcttagggcttcttttatgttatcttaaaaagtgctggtgaattttccattttttacatccatttcacatgtaagagacaaaaaagtctagattggtcttgatattgagataataaaaagtaagtagcattaagaaaggtaacaatcttcattctacagatgaactcattgaaacaatttaggggaatgaggggcaaaaggggagaaatactgctaaagaacatgagcataaaaatgcgtgcgtttcagtgtttaagaaggcttgataaagaatgtcacttttttatttaactgataagatttttgttattttttactttgataagtaaaccaaagaatatttgtatttcaagcagtttgtgtggtgtttctatataattttctgtgtataaataataaagtaggcatttgtttattttgtaaaaaagaaatgaaaatctgctggccagctatgtcctctaggaaatgacagacccaaccaccagcaataaacatttccattgtcactgtaaaaaaaaaaaaaaaacncnggggtncttttgggg

SEQ ID NO: 99 - DNA, 1594 bp, Homo sapiens
ggtggattatctataaattttggaataaatgacttttctattttttttcttattttccagaatactttgcattaaaaatttagatcttcttacatggaagaggtcaaatccagttatagcaaaacacctttactgcagaggccatataaccaaaaagtccaaaggcccagcccagtggaccatttacttcagtgatgttcagtacaaaatttcactgccattaaagactttggaaagtcccttttaagttgtaacaggatttgactattagtgtggatttcgataacccttctttagttaatgtaataaatgctctttgaagctggaaatatactggtttcttgcacccttgtagttttctctgggctttatgcaaaagatgtattttctgaatgtcttagtatgttgctgtctttttacctgcctggggttgccttcagatgtgggtgaggacttgtttacaaaaagtcctagaagaccttaagttaaaattagctctccaattttcaagtgttttcttttggcagaataagttttgggtcctatgagaggtaaataggttggktgcctctcttgctatagcccatctagagcagaacaaaaactttgtttttgagggggatggagttactttttaccttgtcccctaattgaatatatttaggacttttggttttagaaatctcagagttctatagttggaatagtgtcacagagatagtgttaggtttcttaggcaacaaaattggagtgttacctattgcccatctgggcatggctttgatgagttctatataaataatgagtgtagcctaattttctgtcatgtgctacctagcatatacatttctgacagtcaggtggattatcttgaaattttagacaaactttctgcctccttggaaagctctacatctccttgtgattggagtgtgggtttcaagattccagaargtgggtgtmttcattttctattttcaatgcactctaaagatgacctgcttacaggttctctgaggcagacctcagttgctcttgtgatatgtaactttgctttgataaggaataaacaattacatatccagataatgatacagaattgtcaaaatgtttaatcattaagccactacaaatagacattttcgtggaataaactgattttgaaatgtctttcaatttatattgaaatatctgaaggcacctctaaaatttgggtgatgacacagaggtatagattataagatttaattatgaatgggtggtatactgtgaagactacggaagtgagcagaaagatatgtttggcttttttggtttttagttagagattttaaaaaggtctgtgaaggtcaagttgatcattggttttgattgcatcccacaggtttctataaactggcttaaaaatggcatactccattttctggtgtattcattgtaactttaggaagtatttgaaatggtcacattaaagtctaggaatgtcaaattgtattttaatgcgttagttctttttctttttctttttttttggagacagcctgggcaacaagagcaaaactctgtctcaaaaaaaaaaaaaaagggcggccgc

SEQ ID NO: 100 - DNA, 1742 bp, Homo sapiens
ggcacgagctcgtgccgctttgtagtctagggagtttaattaaagtaagtggagacaaaagtactcttttgagagctgtcatttctcttagtgtgacgctattaataatgtagtgtaatgctattttggaagtttggttctttccttttcttttgtcttcctctgactcttttctgtattctaaatgaaaggggaataatgcacttagaggggggcactctcctaaattcactgtctcatgtacgacattatctccgacttcggctctcatgttttgaaaaaatacctcttcatcgctctatttttatttttcttcttcttttattgtgaatctcttttaccaaaaacatttgtagggttcttcacaaagattttttttttcaatcaggatgaaaactagatcatgatgtgaccatttcactgtgagtgtaacttccctttttgacagctccattagatctgccaggttataaatcttcatatttctgacttgccttgaaatcagaaagtgttttcattatgctagtctctgtgagcaacaagcatgaaggaaggcatggcaggtatcatagcccctttgatgaacttacctgtttcaactcagtgccagggcagaacatttactgctaaccctgatgggtcaactttgattgcaaattatgtgtggtacattttgaatttaaagaatgtttctgagattattctacgatcacttgtcatttttatgtgtgcagtaatgtgttgtgtataacttggatttcaacaatatccattgtttgaaagttagaaaatattctaagaatactaattatcttgctcaaataatcatttaagtacaactgtcacttgattatggtgaatatttttaagtaaaattatatatttaaggtgtgctacctctaattttattgtcatacaaaaagcagattattgaacatgttaatgtaaattgtacttttaattttttccagtactctagaacatgtgtaaggttaaaagaatttaaattacccaggtttttctttttacataataaataagaagaaatcacaaaggaagcagatattatattgtttttaatatacacatgaaattgtttgactttattttgagacctcacacaagtataaacatggcagtggtgtgtatgatcaaagtaagaaattaaagagttaccggttctttataaaccagaagtccattgacttttaataatgctgtctcaaatatttgatagtaaattgtggaaataatcaaagctgagcctatgggactgtactttgtagtactgtttaatttaataactctaataatcccttaagaatattaggaaaaataggccgggtgcagtactcacgcctgtaatcccagcactttgggaggccgaggagggcggatcacctgaggtcaggagttcaagaccatcctggccaacatggtgaaaacccatccctacaaaaacacaataattaggcaggcatgatggtgagtgcctataatcccagctattcaggaggctgaggcgggagaatctcttgaacccaggaggcggaggttgcagtgagccaagattgcgccattacactccagcctgggcgacagagcgagactccctctcaaaaagaaaaagaaaaaagaaaaaagaatattaggaaaaatatcttaatgcaaaatatattaattagtaatctgccaacactgagatgtactataaggccaagaagaaaaaaaaaaaaaaaaaa

SEQ ID NO: 101 - DNA, 1501 bp, Homo sapiens
ggcacgagcctatttctgcttactgtgttaccagagagcctgggggtctggatcctatctggccccgtcagggtggattgccaaatgagcagttctcttgccccagtccctttcctgtgctataaataagccccatgtttattttcttatgttattgaaatgagcacttgtgatttgggcctcttttgaggagtccagagagcgtccatccggtgcctggtgagggccctgcatggctggctgctgtctgaagctatttggagtcctctccctgtgttttctatgtggcttaatttcaatagaaagggttatatgcaaccctgtatctgctgattttcaggtttcaactttctgccagcgtcactgcctgcttagaagtaaagttatgtttcccataaggggataacagccacaattgaggtaattaacgaaaattgtacattggtggcagcacctcctataggatttccaatagtctttctctagtagatcattgggggctcaccttgatctcctctcttctgtctaccctgcaccaaaataccttgtcctgttttctggatatagttccaataatttttttcctaacagcctttttgtcaccagttggtttgatatcttacaacttggccaaatgagggttccattaactccatcttgtctaatgcatggagaattcaaggattttttttttcctcttttcatagcaccttccagttgccagttgtaccctggcccttctttggaagtcataatgatgaatatccattaataagagattgatgctctttcaactctcatgtcatctataccatctcagtggagaggatgactttggatgaggttggaatacaaaggaaacatttggaagtccactgcagtgtattatatgctgtgtggaagtctgggggttaggaaatacctggagggagaacttcctaagaaatgatttttggttcttttaggccttaacagcacaataaaagtatcccatgagaccattatgagcaggacacgacattgtttcacaccttgggctgtgactatttacttctcggtacagattactctggttaaatcactcagtaaagaaatcttttcatgctcacaatctgaacctgaaggctattactgaagagaattgcatctgacaacaaaatttaatttacttccagagaaaggaccagaagaaagtaaattttcatttatgtttttaagtctattgtcttaaaaagattcttttcccttaaaaaataaaaaaacctgatgtgatgggttccttcagtcaacaaatacttattgagcagttattgtgtgccagatactgttcttggtgtgaggatatggcactgaacaaaacaatgtacctactttcgtcaagcttacattctagtgaggaagataaccaaaacaagtgactgaatataatttcaaatgtcaataaatgctgtgaagaaaataaagtcagagtattatatgtaaaaaaaaaaaaaaaaaaaaa

SEQ ID NO: 102 - DNA, 791 bp, Homo sapiens
ggcacgagctgcatttgatctcattctttagtccaatgtaagtaagagtaaaacaatgacatttaaggccaccaggctattctcatttttggaaaaatgctggattacattaccagcatattaaatgagaatatcaaggtgtaatatctccctagaaattgtctcaccttcaatactattgacatttttggacctgataattttgttgtgggctctagcctcatgttataggaggtttaccagttttcctgccctaaacttaccggatgtgaatagcacactccactacctacagcagtaaaaactaaaattgtctctaaacattgacaaattgtccctggtagtgaaaatcacccctggttgagaccgtgttgttgaaaataaaacaaaaactttcacatcaataaatatgttaggctgtgtatgttaaggattaacattaagacaatatggagcaagcactacatgaaagcagtgacgattggggaattagtggcacattatcctaatagttaatatagtgactgtaatatctaaatatcatcctatagagtttttcttagattttttcattagtataacaggatgttgtgtatgttacactgtatatactgttattttgagagacaattttgggaattttgccaaggtattttcaattataggtctttaatacattctaagcaagtgggtctcaaaaatgggaattttacaccccacattcttcttcccatccggtggacatttgtcaatgtgcgcaaatatttctgattaaaaaaaaaaaaaaaaaa

SEQ ID NO: 103 - DNA, 442 bp, Homo sapiens
gaattcggcacgagggctgagtgggggccatccttttccatggctgagtgagggccatcctttcatgtggctgagagggatccatcctttcctgtggctgagcgggatccattctttcccgtggctgagtggaggcccatccttaggtacctccagtgagcagcctacatccttggaggatggaaaattgatttgcctcttcacagacttctctggttctagctttgggctatttatgcgtgaagctgctaagaacatttcccaaatgtgatttgtataaatacctaggagtaggattcctagtgtgaggtcagagtctgtctagcagcataaaaacaaccaaaagattttctgagcctcagggcacatgggtggggcccagagagcacccaggaccgaagctgcccaggacctccctcgaggggggcccgtaacccattcg

SEQ ID NO: 104 - DNA, 890 bp, Homo sapiens
  SITE (818): n equals a,t,g, or c
  SITE (819): n equals a,t,g, or c
  SITE (829): n equals a,t,g, or c
  SITE (859): n equals a,t,g, or c
  SITE (887): n equals a,t,g, or c
cttgtaaatgtttcttttcccttaaatacagataattcatttgtattgcttattttattatgagctacaacaaaaggacttcaggaacaagtaatgtattagtatggttcaagattgttgataggaactgtctcaaaaggatggtggttattttaaatataaatagctaatgggggtggtaggcctataaaattaaatgccttgtataaaatccaaaatgaatgcaaaattgttttcacttgtattgactttatgttgtatgattccaatctctgttctgtttggcacttgtatttaattcttcacctttgtaagacatttgtatattgtggatgtgttcattcaagctatttaatatctggcactgttaatacacagtactttattgtacagactgttttactgttttaattgtagttctgtgtactttttttggatggggctggcatgttttctttgtttcctggcaatacgacgtgggaatttcaatgcgttttgttgtagatgctaacgtgtcagaatcctttacattcaacttttctaagaaaagcattttcagtcttgtagtgtgtgcttacagtaactaattttgttgaaaatggtttcaagttattcaaatttgtacaggactgtaaagatttgttgacagcaaaatgttgaagaaaaaagcttatagaataaaagctataaagtatatattaggatctgcaaacaatgaagaattatgtaatatattgtacaaatgtaagcaaaggctctgaaataaaatgccatagtttgtgaaaaaaaaaaaaaaaaaaactcgagggggggcccgnnacccaatcgnccaaaagtgagtcgtattacaattcactgngccgtcgtttacaacgtcgtgactgggnaaa

SEQ ID NO: 105 - DNA, 737 bp, Homo sapiens
  SITE (736): n equals a,t,g, or c
gctgcgagaagacgacagaagggggagctcaccagcgccaccgtccccggcgaagttctgcgctggtcggcggagtagcaagtggccatggggagcctcagcggtctgcgcctggcagcaggaagctgttttaggttatgtgaaagagatgtttcctcatctctaaggcttaccagaagctctgatttgaagagaataaatggattttgcacaaaaccacaggaaagtcccggagctccatcccgcacttacaacagagtgcctttacacaaacctacggattggcagaaaaagatcctcatatggtcaggtcgcttcaaaaaggaagatgaaatcccagagactgtctcgttggagatgcttgatgctgcaaagaacaagatgcgagtgaagatcagctatctaatgattgccctgacggtggtaggatgcatcttcatggttattgagggcaagaaggctgcccaaagacacgagactttaacaagcttgaacttagaaaagaaagctcgtctgaaagaggaagcagctatgaaggccaaaacagagtagcagaggtatccgtgttggctggattttgaaaatccaggaattatgttataacgtgcctgtattaaaaaggatgtggtatgaggatccatttcataaagtatgatttgcccaaacctgtaccatttccgtatttctgctgtagaagtagaaataaattttcttaaataaaaaaaaaaaaaaaaanc

SEQ ID NO: 106 - DNA, 1280 bp, Homo sapiens
ggcacgagtataaaggcccctccacccagcctctagcccatttctttctctggcttttgcaggattcctcattctccctgaggtcttaactatcacatcatgcacgttctgccactgctgttatcactgctgctgctgctgctgctgctgtcagctagctttgtgactttcagcacccccacttccagcagaaattctagctgccctgattgtgagagtctgaacaccggtcttccatccctgatgatgtttggtggatctctgctcaaatgggttcagaacacacacggggtggaatcactcttgtcctctgccaaggtgcgcctgcttccaccagccctaggggttctgttcccaagactacaccctggcactctgacccttgtcttccttttaattcccttcctcacagtgtcttcttccacatctgacgttcttagctctttagagtccccaaaactatctgttaccatatttcattattgttaactctaaagattttggcatcaaacaccctgcatttgaatgctagctgtgtcacacatcagatgctttactttggcaaatcatagaactttctgtcaatagggataataatggtacctatattgtaatattgtgagtgttacttggataataaagtacatagcacagtatttggcacatagtaattgctcaacaataccaattgttattattattagactgtgccctctaaattatttgtctacggattatgatctgtataaatgacttatcaattaagaagaccacaggtatgcagagtctcatcactcatacaagactgatgtcaattaactaagagaagtttcgtcactaaccaggagtttcacatcatagttccacactttgcttctactcccaatatggcttgttgacttttcactctctttaccctgttttctttctatggttcccagggctatcacttttctttattttggttaatacatatagctgtacactgacccagtctccatgaaaaatactgtcatatactccctctttccctctttccctaatatcatcatctcatagagatcaaactcacattttctggcaccattattctttttataaaatactttacttttaaatttttacccaactacgtctatgttattttagctagctaagctgctataacaaagagatctaaatacagtggcttaaatataacagaagcatatttttctctcatgtaacagctagaggaatgtgtgtagtccagagcatacaaaccacaagtcattcatgac

SEQ ID NO: 107 - DNA, 833 bp, Homo sapiens
  SITE (35): n equals a,t,g, or c
  SITE (140): n equals a,t,g, or c
  SITE (590): n equals a,t,g, or c
ggcacgaggagaacttggcaggctctccccatggnagtcttattcctcctcctgttcctatgtggaactccccaggctgcagacaacatgcaggccatctatgtggccttgggggaggcagtagagctgycatgtccctnaccacctactctacatggggacgaacacctgtaatggttctgcagccctgcagcaggctccttcaccaccctggtagcccamgtccaagtgggcaggccagccccagaccctggaaaaccmggaagggaatccaggstcagactgctggggaactattctttgtggttggagggatccaaagaggaagatgccgggcggtactggtgcgctgtgctaggtcagcaccacaactaccagaactggagggtgtacgacgtcttggtgctcaaaggatcccagttatctgcaagggctgcagatggatccccctgcaatgtcctcctgtgctctgtggtccccagcagacgcatggactctgtgacctggcaggaagggaagggtcccgtgagggccgtgttcagtccttctggggcagtgaggctgccctgctcttggtgtgtcctgggganggggctttctgagcccaggagccgaagaccaagaatcatccgttgcctcatgactcacaacaaaggggtcagttttagcctggcagcctccatcgatgcttctcctgccctctgtgcccttccacggctgggacatgccttggattctgatgctgctgttcacaatgggccagggagttgtcatcctggccttcagatcgtgtctggaggcagaggtccctggggttccagcagaggaaccga

SEQ ID NO: 108 - DNA, 1641 bp, Homo sapiens
  SITE (1603): n equals a,t,g, or c
  SITE (1632): n equals a,t,g, or c
gcggacgcgtgggcggacgcgtgggcttgcttgctgtgactggtggagctgccgcgctgtccgcgttatctcctcccggtgagaacgaaccgcagtgtccaccggcgaggagccagccctgtcccggtcagagaaagacgacgaggatacctgggagcgggcggcggccgggctgggccgcgccggtgcgggctggcgactctgctcctccgcttgctgctgtctctgggaactgggtgccagcgctgaggggcttccagcggacagggacccccttccccggctcccctgcccaccctgccggggagggcggaagatgccggtgaagaagaagagaaaatcccctggggtggcagcagcagtagcggaagacggaggcctcaaaaagtgtaaaatctccagctattgcagatcccaaccccctgctagactaataagtggagaggaacatttttcaagcaagaagtgcctggcttggttttatgaatatgcaggtcctgatgaagttgtagggccagaaggaatggaaaaattttgtgaagacattggtgttgaacctgaaaatattattatgttagttttagcgtggaaattggaggctgaaascatgggattttttaccaaggaagaatggttaaagggaatgacttcattacagtgtgactgcacagaaaakttacaaaacaaatttgactttttgcgctcacagttgaatgatatttcgtcatttaagaatatctacagatatgcctttgattttgcaagggataaagatcagagaagccttgatattgatactgctaaatctatgttagctcttctgcttgggaggacatggccactgttttcagtattttaccagtacctggagcaatcaaagtatcgtgttatgaacaaagatcaatggtacaatgtattagaattcagcagaacagtccatgctgatcttagtaactatgatgaagatggtgcttggcctgttcttcttgatgaatttgttgagtggcaaaaagtccgtcagacatcatagcaagaactatgtgaagaaaatgcaaacctttcaattcccacgtgtatacaagctaatgtgatgagggggaaaaaaatccaacgggtgcattttcattcatatgaaagacttctcatagtacttttttttcctttttttaaaggaggtttttcttgttacatgtgatgggcattgagccacacctcttcttagactgaatattgaagtttttgttttgagttatgtttataacatttatttcagaacaataaagattcagatttgtgacaaaaaaaaaaaaaaaaaaattaatttcaacgagaaggcgatccataaggagggctgtgtggagaagattgggggctggctgaggaaaaatgtgctggtggtagctgcagcagcccttggaattkcttwyrtcgaggttttgggaattgtctttgcctgctgcctcgtgaagagtatcagaagtggctacgaggtgatgtaggggtctggtctcctcagcctcctcatctgggggagtggaatagtatcctccaggtttttcaattaaacggattattttttcagaccgaaaaaaaaaaaaaaaanaactcggggggggccccgtaacccaattngccctaaag

SEQ ID NO: 109 - DNA, 571 bp, Homo sapiens
  SITE (249): n equals a,t,g, or c
  SITE (548): n equals a,t,g, or c
tcgacccacgcgtccgggggcgtacgcgggcaagatggaggcgactacggctggtgtgggccggctagaggaagaggcgttgcggcgaaaggaacggctgaaggccctacgggagaaaaccgggcgcaaggtgagaagtgtggagtgagggtcgcagttgaggcgtccagcgttcggggtccgggtcgcgcttgaggagagcaaagggctaataaggaaagacagctgccgagggcgcgcatgccgggncgctaacgcatgcgcgagaagacgggcgccctcccacgatgtctggggctgcttggcgtgggactcctctggcgctggtgcggtcgtcgcgcacgcgcgggggtgggcaargcatggtcagcgacccgcagtccatctgactcctgcttcccgggtgttgctcgtgtaggtatctagggctgcctgtaggttcagatgcttgttgggttaggcgtgatttgttccgttcctctatggcctagctggtctttaacccccgccttcgattctgagtcagacagactccccagttcgggcangcaattcccttggaacaagggca

SEQ ID NO: 110 - DNA, 1637 bp, Homo sapiens
ggcacgagcaccactccctgctcttctgcaccccaaatcttctttgttgggaaaagaggtaggagggagctggctgggaggctcctagtctgttgggaagcagtggatggtggctcctctccatctcttcatccctttctcttggctagtgaggacaatagggcaattactgagtcctgtgggcaaggcactgagtcatcggtcgaatcagatgatgcccaggtcctggggatgagtgagtcactcttaatgggcagctcccaagatgaatgttgagagcatcctgcctggctttatgcctgcaagccctccccgtaatctccttccttcttgcaggtgggcaggaagaagcagggtagaaaagttagattcctaatctaactcctacccctcaaccccaagggaccttgttggtcaatagcgaaggaactgggaaggatgttcaaaggctgaggcagggcacagatgtcacatttcatctctgtggaaggtgggctgctcaggccagatggatgagcttgtttgtgtgtgaatgttcctctcaccttcctgatggtgaggggggcgatgtccacttccagatgctgccaagtagacttcctgttttcttcctcttgtcccccccccgcttcctttttatatttacaaagctctctggttatgtacagcagggaaatggtgcctgagagactccttcagatagcagttccttctagtttgagtcaggaggcactgcgtccccagagtccctgcatcctcattcatgaaatgctggcagtcaagggaacagccctggctatctcatgaggttggccttaggatttaagtgagataatgtgtttgacaatggaatcccagcatgagcttgggtttcggcttcattaaaaaattagaatttattgtagaaaatttagaaaatagacagaaaaaataatcctagtaccttctcttactatttgatgtatatcccatatttttttcaaaaaaaagaaataatgataataacatgatagtcatgtatcaatgcattttctacttttgatggttacattattattatgtgagagaaggtcttatttgtggagataacaactacaaaaagtatttgggggggtgatggagcatcaggtactcactcaaatggttgagagcaaaaagttatttgtactgtactttttcttaactttgtgaatattttgaaataaaagtacgtatgccatttggagaaaagaagatagcatagtggtggttttttatgtctggaatatccatgtctgtctattccagtgtctggaatatccatgtctatctatccactggaatatccagtgtctcagttgagggtacttaaagggaaaaacctcccacacttgactttctttgaagagtttacaaagatttgtaatttcagcctgggcaacatggtgagatcttgtctctatatgaaataaaaaaaatttaaaattagctggatgtagtgatatgtgcctgtggtcctagcccttaggaggctgaagccaggaggattgcttgagcacagaagttcaaggctgcagtgagccatgaagtctctcttgtattccagcctgggtgacagagcaagaccctgactcaaaaaaaaaaaaaaaaaaaaaaaa

SEQ ID NO: 111 - DNA, 1588 bp, Homo sapiens
  SITE (778): n equals a,t,g, or c
  SITE (1150): n equals a,t,g, or c
gggaacgttttcccagctgaaccacatgtgacgaaccaacccatttatagtctaaaaattatgagaacaagtctcttttttttcttttttaaaaacatcttggtactttgtggtacattgctcatctccagaagttcccattcccagagtgccccgcgaggctgttggtggccacataagtgaccacagcaggccctggaatgcaagctcttttccccgtggctttggagcagaggggagtcagctgggtggccttgtctcctgaggggcattggccagggtcacactcggttttctagggaccaggctgttccatggggtggagaggcagtaggccatccctttctcttcatcttttatctagcccttccccatacaaacactttctcacagaaagacttgtttgttgtcccctgagcaaggccacagctctcccacctatcttctgttcaggttggcagatgggttcaggcaagggtcattctgagaggagacctccacccaatgctcccgtctgctggcttggtcaccctgagctgctgcctgaggggccaggaaagtggctggtgtccccggcctgtgagagatggccagagcctcagccagacccaccctgccaggagaaaaggggagtggccggagaagccaccccttgagagcaggctgggctcgcccttgtgcccaggagggctgcacaggtgcagttgccactttcagaccacacacttcaagctagagcttggcctgtgcccctggtggttgggggttggaagarcanactgtgttgacagggtctktaattcmcgattccaggtgcttctgawttgttggatcctgatgaatcgcaatcaggactatgtttggcttgagctccagcctcatgaccaccaaccccatcgaatgactgagagctgccaggctcctgccacgttggagctcasaatcctcccgtggggacactgtgctgcagccagcctccagggagccgcttgttttatggcctaaaaagtctctttatgctgagaaggtcacactggactttgctcacacagagatttgacccaagaaaaggaataaagakgccttggataccctgtcttgcccctgttcctgcccccgccgtaccctgctggctcatgscagaagamtnggaacttgctgtctgtgggcatgtttgttgtcggctgamggtagcacccacagcactggccgtgtgtgtgccacagtcaggaacgargtcctgccccccacccattaacccattagctttgtccttactccttgaggccctgcttgaaaagattaatggtgctttgggargctgaggcaggaggattgcttgaggccgggagctcgagaccagcctgggcgacatagcaagaccctgtacctccaaaaaataaaatataaacattagtcaggcatagaggcacacacacacataggcctagctactcagctgaggtaggaggattgcttgagcccaggagttcaaggttacagtgagctatagtcatgccatcatacactcagcctgggtgacagagtgagtccttgtctctggaaaaaaaaaaaaaaaaaactcgag

SEQ ID NO: 112 - DNA, 1926 bp, Homo sapiens
taaccatgttcttaacatctagatgcagaaatggatttgaatgtgatctgcagtttctgtcgtagttatgaaatggcttttgtcaacatgggttaccccaaagcaaacattgcatgctatggaaatacttcttgtctctttttctcccatggtatctgtattgcttctttaataataacatcatgttttacagcctgcactctgtgcccatgtttattcaaccctttttactttggtgactgtttatcagatgtgttgccttgttcttcctgccctccagagcccatgtttttaattataactgaaatatgaaatgataatatttgggctttatttcttttctttaaaggacagtactgctttaaagagacagtgttaaggatcttggaagcacagccaacatgtgtgtgacatggaagaagccactaaccaactcctagatgtgaacctacatgagaaccagaagtctgttcaagtgacagaaagcgacctcggaagtgaatctgagcttctagtcactattggagccactgtacctactggctttgagcaaacagctgcagatgaagtcagagagaaacttgggtcatcatgcaaaatcagcagagaccgtggcaagatatattttgtcatttcagtggaaagtctggcacaggtttgaatggagcaatacttaaaatagttttctaagttgatcattttatggttacttttcattttatagacccttctggaatcctttctgattttcattgctctgccccaaatcaggtgattttaaagttactgcattttctattgagtactgatttgtaattttgactgtagtttcagtatcccttaggaccaaaagtgtttcagatttttggaggggggtggggggagttttggaatatttgcattatacttgccagttgagcatttcttttttttttctttttctttgagacagagtcttgctctgtcatcaggctggagtgcaatggcgcgatcttggctcactgcaacctccgcctcccaggttcaagcaattctcctgcctcagcctccccagtagctgggactacaggcgcccgccaccgcatctggctaatttttgtatatttagtagaaacggggtttcaccatcctggccaggctggtctcgaactcctaaccccgtgatccacccgcctcgacctcccaaagtgctgggattacaggcctgagccactgcgctcggcctgccagttgagcatttctaatctgaaaatccgaaatgctgcactgagcatttcctttcagcattgtgttggggctcaaaaagtttcagatttttagatgtgggctgctcaacctgtagtaggattgctacatttttagaggtgatctagtatttcttgaggattgaattcaccagaaagaatactgttcaacttaagaaattctctaagtatctcagtatttatttacttcagcatatagcagatgtttaacctttggtgatgaaacataaaagagattttccttttaatttgcatcaaaaattcttgctcagaagtaattaggactcactcaaggtaaaaagtgaaggtcagaaaactgcaatctcactatcataaagctgatatatctcattaccacataagcagtgagagggcaaggattgttgtctatttttttttccaccaatatatcccacgctcttagtgtctggcatatagtaggtacccagaaaatatctgtgggatgaattggtaagcaaatgttttccatccaatattttagccaataccctcagcagctttgtgaagataggcactattattatcctcattaatcattaggcttaggacacataaataatttccccagggccactcagctagtaatcacagaactggagctcaaatcccctgcaaaaaaaaaaaaaaaaaaaaaaaaaaa

SEQ ID NO: 113 - DNA, 2274 bp, Homo sapiens
cggtggaggaggaggcagagaggagtggagggcggagtagacggaggaggctgctgcagagaagaaagtgtcagagccggttcggctttagagtgtggtgaagggtacttttcatggtgcatggaaggaaagccaatgcgcaggtgtaccaacattcgaccaggagagactggaatggatgtaacaagccgctgcacccttggagaccccaacaaactgccagaaggggttccccaacctgcccgcatgccctatatctcagacaagcaccctcgacaaaccttggaagtgattaaccttctgagaaagcaccgggagctatgtgatgtggtgctagttgtgggcgccaagaagatatatgcccatcgagtcattttgtcagcctgtagtccctacttccgagctatgtttacaggagaattggcagagagccgtcagacagaagtagtgatccgagacattgacgagagggctatggaattactgattgactttgcgtatacctcccagataacagtagaagagggcaatgttcagactcttctgccagctgcttgcctcctccagctggcagaaatacaggaagcctgctgtgaattcttaaagagacaattagatccttctaactgcctgggcattcgggcttttgctgacacacattcatgtcgtgagttgctaaggatagcagacaagttcacccaacataactttcaagaggtaatggagagtgaagagttcatgttgcttccagccaatcaactcattgatataatatccagtgatgagctaaacgttcgcagtgaagaacaagtgttcaatgcagtgatggcctgggtcaaatacagtattcaggaaagacgtcctcaattaccccaggtgctgcagcatgttcgtttgcctttgcttagtcccaagttcctggtcggcacagtaggctctgatcccctcatcaaaagtgatgaagaatgcagagacttggtagatgaggctaaaaactacctcctattgccgcaagaacgaccactaatgcaaggaccaaggacgagaccacggaaacctatccgatgtggggaagtactctttgcagttggtggttggtgcagtggagatgccatttccagtgttgaacgatatgatccacagaccaatgaatggagaatggtggcttcaatgagcaaaaggagatgcggagttggggtcagtgttcttgatgatctgttatatgcagtaggaggccatgatggatcctcttatctcaatagtgttgaaaggtatgaccccaaaacaaaccagtggagcagtgatgtggcccctacaagcacctgcaggacaagtgttggtgtagcagtacttggaggctttctttatgctgtgggtggccaggatggtgtgtcttgcctcaacattgttgagaggtatgatccgaaggagaacaagtggactcgggtagcttctatgagtaccagaagactaggtgtggctgtggctgtgttaggagggttcttatatgctgtaggtggctctgacgggacatctcctctcaacacagtggaacgttacaatcctcaggaaaacagatggcacactatagcccctatggggacccggaggaaacacctaggctgtgcagtatatcaggacatgatctatgctgtaggaggtagagatgacactacagagctgagcagtgctgagagatacaaccccagaaccaaccagtggtctccagtggtggccatgacatcacgccgtagtggagttggcctggcagtggtcaatggacagctcatggcagtaggaggttttgatggcacaacatacttgaagaccatagaagtttttgatcctgatgccaatacatggaggttatatggcgggatgaattaccgtcggctagggggtggcgtaggagttattaaaatgacacattgtgaatcccatatttggtgaacacagagaagacagtcttgtatatattcctctgtattctggggagctttgaccttggagctttgtacagcttgagaaaacattagaacaaattttattatttgccggtgcctcaacaaatggaaatacaatccaatgaaagtacttcacctgcaagatgcacaataattttcaactctgtgcagaagaatatttatttttggttttaatttatcatggttttttgttgttttcgttttgaacttatccttcctcccacaaaaaaaaaaaaaaaaaaaaaaaaaaaaaaaaaaaaaaaaaaaaaaaaaaaaaaagggcggccgc

SEQ ID NO: 114 - DNA, 1615 bp, Homo sapiens
ggcacgagctcgtgccgcttaagtttacaggttcagatagcttttctcacaccataggactcgtctatcatttttgtgtagtttttcttttttaatatggcttgtcttatcagatttcctgctattggttccctcccttattccacctggcccttctttttctttatctttttatttttctcctgtttaacttttattccattttctccactttcttctttctgtgagccataccctagaaaagaaccctagtgggccagagttgagatgcaaattcttagactactctagccccttgaactcactccatattggcaaagccagaaatcctgactgttttacttgctgttctcaaatcaatccatcttactttccagggaatatcttctgtctgctttggatatgattccagaagccatgtcacttctagtaaattactctgccttccctgtacactttcaaatttcctagggcctcttgcatataaagtggaaggtctcatctctaaatttctagtagaatccaactaaaaacacataccctgagctgagacccttctctgagcaaaggaactcacccagtcactctttggaactttcaagtcgtgctctttgtacgtatcatatatactatgaacttgttttctcctcattgaaagataagatgtcagctttgcatgtttcctttattccagtggagatccttcagggtttggtgagtggaaatctgggaggcacacttgggccgactgtcagcagccccattgagcaagatgtggtcagtcccgtttccctgccccggagagcaaagacctttggaggatttgacagccgcttcagcaaggtggtgactattctggtaactatggttacaataatgacaaccaggaattttatcaggatacttatgggcaacagtggaagtagacaagtaagggcttgaaaatgatactggcaagatacgattggctctagatctacattcttcaaaaaaaaaaattggcttaactgtttcatctttaagtacattttgctgccatttgtattgggctgaagaaatcactattgtgtatatactcaagtctttttatttttcctcttttcataaatgctcttggacattattgggcttgcagagttcccttattctggggattacaatgcttttatcgtttcaggcttcattttagcttcaaaacaagctgggcacactgttaaatcatgattttgcagaacctttggttttggacagtttcatttttttggatttgggatagattacataggagtatggagtatgctgtaaataaaaatacaagctagtgctttgtcttagtagttttaagaaattaaagcaaacaaatttaagttttcttgtattgaaaataacctatgattgtatgttttgcattcctagaagtaggttaactgtgtttttaaattgttataacttcacacctttttgaaatctgccctacaaaatttgtttggcttaaacgtcaaaagccgtgacaatttgttctttgatgtgattgtatttccaatttcttgttcatgttaagatttcaataaaactaaaaaatctattcaaaacattaaaaaaaaaaaaaaaaaaa

SEQ ID NO: 115 - DNA, 1221 bp, Homo sapiens
  SITE (697): n equals a,t,g, or c
  SITE (700): n equals a,t,g, or c
  SITE (701): n equals a,t,g, or c
  SITE (712): n equals a,t,g, or c
  SITE (720): n equals a,t,g, or c
  SITE (722): n equals a,t,g, or c
  SITE (742): n equals a,t,g, or c
cactagtggatccaaagaattcggcacgaggagagacttgcatagatcagggagtatgtgaaaataaatgtcagttgccagagaaagaatagatcaaacagtttatttgaatttctgatgagtttggtgaggaagtgtatagcacttaacatttggaaggcagacaaaaggttttgttgttggtgttatgttccttttgaattttagatacataatgcgattttttttctggccaatgctccaggcaaaattgatgtctttccactttctaaaacccatcatatttatgaactctctgatactctgtctgaaacagtcgtgctcctgtgaggttgaaatatctctcctgcctctatcacagcagacgcacagaactgatctgggattttctcactcaggatcccaaaatgagccctttctcaatcttgacaaacgtgcagcagaagcccattgtgcagttatggttctgtgcctgctgggcagggatttaaaggccaggagaagcagggaaggccctgctctctgctccagccaggtggtaatatgcattctcaaactagctaggaaaaggttctagattcctttgaatctattgctgaatcccactgattagcttttcccactgacagacattcaaatctttgtttttggagcttcctctgcagacttggtgtaaatttcaaaaaaagaaaacaangcnntgaagcttaanacaggcananacagttggcttcctacctangcatgcttcaaactcactatatgacttggtaaattctgttactttaatgcatgcttgttttcacatgtgtaaaatgagagagtatcagactagatcatggatttgtttcccctctttttccccttctctctcgaagagtagaaccctttaaattaaatcttttataaaagttaagtggccgggagctgtggcccatgcctgtaatcccagcactttaggaggccgaagcgggtggatcacctgaggtcgggagttcaagaccagcctgaccaacatggagaaaccctgtctttactaaaaatacaaaaaattaggcaggcatggcggtgcatgcctgtaatcccagctactcgggaggctgaggtaggagaatcgcttgaacctgggaggcagaggttgcggtgagccgagatcatgtccattgcactccagcctgggcaacaagaacaaaaatccgtctcaaaaaaaaaaaaaaaaaa

SEQ ID NO: 116 - DNA, 1149 bp, Homo sapiens
  SITE (1120): n equals a,t,g, or c
  SITE (1140): n equals a,t,g, or c
gggtttctggggattggattcaaagagcagaagtatgatgccaggggctggtaaggactcagccatatagagatttcagctgcattataatgtatatttgagaaattgagttcttattatcagaaaattgacctatgtaatgaaatactagaagaaaactctaaattagaatggctttgttatgaatttttaatgataagtactaacacttaaaagggaaaaaatttttcaaagaaaatgcctaaaaatgtgttgtatctgagatcatcatatatgtagtattacagtgcaaacactattaatgttaatgaggtaggtggatttttttaatgaaaaaacttgaaatattatcaggttgtccccatttatggaatttaagcttgtcagaaagatccagatagctatattaatattttatctgtatttggttgcggttgcttttaaaaataagttttcttataagtcatttcaattttttggtttagagtccatatttcaaaataaaaagttaaaaaaagagtaccttatgtaatttagcaaggtattccataaactcagggaggaaaaaaaaaaaactaagatgagaggctagttataatgatctttatttatatattgcaggaaatgatttcctctctcacaacttagcataatttactgctaatatttttagccatgggttgaaaaaaattaartggttttgtaagtgctaatcctttgttactcatttaaactggtaaaatgtagtccccgctccctgaggaggacctgtccaaactcttcaaaccaccacagccgcctgccaggatggactcgctgctcattgcaggccagataaacacttactgccagaacatcaaggagttcactgcccaaaacttaggcaagctcttcatggcccaggctcttcaagaatacaacaactaagaaaaggaagtttccagaaaagaagttaacatgaactcttgaagtcacaccagggcaactcttggaagaaatatatttgcatattgaaaagcacagaggatttctttagtgtcattgccgattttggctataacagtgtctttctagccataataaaataaaacaaaatcttgaaaaaaaaaaaaaaaaaaangggsggccgctctaaggggntccaagctt

SEQ ID NO: 117 - DNA, 1955 bp, Homo sapiens
ggcagtgtccccaaggcaccgaaaccgaggcgggggtctcggtccctccgcgcaaggagggaggcggaccgtacgtggcaggactcaccgccccgcacgtggcaggactcaccgccccgcgccgtgttctccgagccatggcgccagcgctgtggcgggcctgcaacggactcatggccgccttcttcgcgctggcggccttggtgcaggtggtgtacacaatccctgcagtactgaccctgcttgttggacttaaccctgaagtcacaggtaatgttatttggaaaagtatctctgcaatacacatactcttttgtacggtgtgggctgttggcttggcgtcctacctcttgcatcgtacacaacagaacatcttacatgaggaagaaggcaggagctgtctggtctggtgattattacagcatggattatcctgtgccacagttcctcaaagaatccagttggtggaagaattcaattggctattgccattgtaatcacacttttcccatttatctcatgggtctacatatatattaacaaggaaatgcggtcctcttggccaactcactgcaagacagtaatttaaataaattcaagaacttcgtttttaaaatgaatattttcaatcaattttttataaacattaggggaacaagccaggaatttatttcaggtaatttgggctaatagttttaaaactccaaataactttttaagggtgcatataattcgatgtaagattggatgggacaagtaagaaatggtctgatattttccagacactttctgcagggtcttgtgtcataatgtagtggaaaaggctagaaataaagtttaaaaatacagttctaacttaactttgtactatgttatttgggcaatatataaacctcctggtggatattatctataaaataggataatgccagatctacttacttacacagtaacaaggatcaatctagataatgtaagaacactctgaagatataaagtgtttggaaagattacggagggctgcccatgattaaaatagaggggagcagggattggtaatatactgaaatagacattcaagagagggtataccccgatctttttttttttttttaagacagtcccactctattgcccaggctggagtgcagtggcatgatcatggctcactgcagtcctgacctcccggggctcaggtgatcctcctacctcagcctcccaagaagctacgactacaagtgtgcaccaccatgcccggctaaatttttttaaattttttgtagaggcagggtttcaccgtgttgtccaggctggtcttgaattcctgagttcaagcgatctgtccaccttggcctcccaaagtgctgggattacaggtgtgagccaccatgcccagtccagccctaaactaatcttatccagagctggcatagtgcagtgaactaaaggagaactctagatgaatcaaatgagcaggcatgtcttggaaagaaagggaagctggatagaataaaggaattagggaccaaacaagaaggcaatagggactataactacattctaaatgagaaataaggtcaaaatctatatacattctttataaatggatgtccaaagtaatcctagggaggagagctttttttttttcatttccattttcatttaaaaatggatacttgattattggaaaacttacaattgtgtttggaacaacttgggtatttgaatctaattttccaattgcaaattttatgatacctaaatacagataaagtatttccaatgaaaatttagtgtccaaatgagtggggctataaatgtaaaatacactggattttaaagacatggtagaaaaagaacagaaaatattttttgtattgattacatgttgaaacaatattttggctataatgggttaaatatactattaaagttgaaaaaaaaaaaaaaaaaaa

SEQ ID NO: 118 - DNA, 1135 bp, Homo sapiens
  SITE (1092): n equals a,t,g, or c
  SITE (1107): n equals a,t,g, or c
  SITE (1109): n equals a,t,g, or c
aatggaaactgttatcttacacacagcactgatgctaaagaaaagaattgtggtgtatcaccccaagatagaagcggtccaggagttcaccaggactctgcctgccctgcagatgtgcacaggttacgtcgctggatttgtagacttggaggtgagcaacagaccagacctctatratgtgtttgtraatctggcagagagtgagattaccattgctccccttgcaaaagaggccatggcaatgggcaaactgcacaaagaaatgggtcagctaattgttcagtctgcagaagatccagagaaatcagagagccacgttatacaggatattgctctaaaaacaagagaaatctttaccaacctagcaccattttcagaagtttcggctgatggagaaaagagagtccttaatttggaggcgctaaagcaaaaacgrtttccaccagcaacagaaaacttcctttatcatctagcagcagccgaacaaatgctgaaaatctgactgtgtgacagaacgtatcactgatgactgatagaaagccctctttcactctgattacccactcactacatgaagtcctgaaaataacagagaaactgttatatctttttaatgatttatttgcaagtattgagatttgacctgaaaaacaatgaaacacatgaacacacttccgattttctcctcgctgattagcttcctgcctgctgtcagtgctggacgaagtgctataactactttatgtaacattacagaacagctagaggtcctggggtaagagaaaaaaagcacatcacaacaaatgtgaaagccttcattattacacgttccagtttgtctcgctgtgtaggcataagctaatggtttattttcagaaagctgcctgaaacgttgctttgtattcttctaggaagaactttaattcctcctgaggaactctactttctgagccaaactgctaattttctgcggaactgtctagaagatcattcaagagaccctgcagttgcactttctcgtaaaagttaaaaaaaaaaaaaaaaaaaaaggttttttcccggcctttgaacattttgcyttatgagagtggncccatagatcttttntngaaagacaccaaaggagcaaaatatc

SEQ ID NO: 119 - DNA, 2593 bp, Homo sapiens
  SITE (1074): n equals a,t,g, or c
atttatatactatacacacacattttaatgtatataaatatttgatacattctgtgtgttatataatgtggtacccagtcctctgctgggacatggatgtacataatgaaacatggaggtccagacgtatgataactctcctgtttcccttccctcattgcctacaggggcaatagtttcatatcttgggttttttattgtttaatttttttttatggggaggggttctttgggtgggtaatagtcagggggaaaggacagtgtctatactttttaaagatgtatataaatgtttcatgttattggttttgtacctagtcctttgcatggatatataggtacctaatgaaaatcgaggatcagtgtatgacaaatctcccatcctcccctttccttattgcctgtgtcggcaataggaagtagaatagttgtgtgttgtttacttacttgtctgttttagagagatttctatttttggtaggggaatattcttaatatgttttcatatctttatttcattttgtagtcttttgcatggctatgtagggacctaatgaaagtcgagtttcataatatgacagctcacttcttttcctacatatttcctcacttagcagtagctagtgtagttattttgtggttattttatttcattctctaggatctattccattaaggatgcaagtgtgtagatgcatatatatcatttgcttctttcttccgccattattttcctttaacacttagtcccttgcaaggggtctgactatacctaacaaaaataaagacctactaaatccctgccatctggctggaaggtgtagcagtgtattaatgtaactaatagcaacaggtgtgcagcagataagacaggagaagacactcagctatggttgagttgtgaaagctaattagatccagcatttcttatgttgattcagattgaatgaggtagtgaaaagggacctgtgcttttgtaaattctagaaaggcaagaggacaatattgaataaagctgtgtttaaacttcattgctcatatatcttttagtaactggtaaaccggcgagckgantaagccaataagagtgctgtctagaacgcatttgcaaaccgttaagagtagcttctttttgaggcctggacttctgattcatctatagaagtctattatgattccatcaattgcatagcttgtgtacctggtagaaattgtgtcttggaatgaccctttcgagttattgacatggctctgatgaatagaacatgagccccaaaactaaatccaaaaggaattttctatctttcatcccccacatgtggcaagacaagttggccctttcttacccagaggtcttttgtgtgactgcatctttctcctccgttctccattgtgtgctttccattttgtctttagtgcctatactgttaggtgttttcttcactggcattcacaaatttaagccattgctgcctcattagccttgtattttgtgtgcatatcatrtatccagacctgtatgttcgctttaagcattcttatatcacactgtctcctcatctaccatatggtaaatgttaaaactccacatttgtctgcatcagggaaaatgcatgggcacacatcctccctccctccctctctgctctcctcccttccttcaggcctcttagcattgtttgttttcccatttctgatactactactccatgctgaagatttgccatattactattttggaaacattgagtgatagaactcctagaaaatttgcaaagaaatgttacatactgtatatcaaactctcagattctagtgttgaaaaagtagcctatactttgctattacttatacctgctgccatagaaaaaaataagtttattcatgacacatttacatttgatcataaataaaagaaaaaagggcacctttttggagttagtcatggtagtcattagtgatatttctgaacagttcttaatttaaaatacttcaaaggaagtaaaggtcatggcttagctgaaggaaatgctccagaaattggactgtgtaaaccatcagtacaataatacgctgtgtatgtatgtgtatataaaatgagaattatggcataattggagcatttgcattaatcaacaaactcacattgagacaaaacttagttttacagctgtcttgattaaagccaagtgttccatgttgctgtgaagaatagcctctttcaaatactttggaaagtagttacttggaaacttgtaaaggtattacatttttatatttaaacacctatagagatcttcaattccttgagtctgagcttgtgggtggaattctaaatttgtatcataatctgtcttttgtgaaacattttgaaaatatgtatatataatattgtatatgcaaattgtgttgtttcacttgtaaagggaaaaggcttatttttctttatatttctgataacttgttttgcatatgaccagcactgactgaaaggcatgtgtagctgcaaacactgttgctttttttgtgaaatgaaaataaaagtatttaaatacaaaaaaaaaaaaaaaaaaaaaaaaaaaaaaaaaaaaaa

SEQ ID NO: 120 - DNA, 2207 bp, Homo sapiens
ggcacgagcacgaatcagctgcaggtctctgttttgaaaaagcagagatacagaggcagaggaaaagggtggactcctatgtgacctgttcttagagcaagacaatcaccatctgaattccagaagccctgttcatggttggggatattttctcgactgcatggaatcagaaagaagcaaaaggatgggaaatgcctgcattcccctgaaaagaattgcttatttcctatgtctcttatctgcgcttttgctgactgaggggaagaaaccagcgaaccaaaatgccctgccgtgtgtacttgtaccaaagataatgctttatgtgagaatgccagatccattccacgcaccgttcctcctgatgttatctcattatcctttgtgagatctggttttactgaaatctcagaagggagttttttattcacgccatcgctgcagctcttgttattcacatcgaactcctttgatgtgatcagtgatgatgcttttattggtcttccacatctagagtatttattcatagaaaacaacaacatcaagtcaatttcaagacatactttccggggactaaagtcattaattcacttgagccttgcaaacaacaatctccagacactcccaaaagatattttcaaaggcctggattctttaacaaatgtggacctgaggggtaattcatttaattgtgactgtaaactgaaatggctagtggaatggcttggccacaccaatgcaactgttgaagacatctactgcgaaggccccccagaatacaagaagcgcaaaatcaatagtctctcctcgaaggatttcgattgcatcattacagaatttgcaaagtctcaagacctgccttatcaatcattgtccatagacactttttcttatttgaatgatgagtatgtagtcatcgctcagccttttactggaaaatgcattttccttgaatgggaccatgtggaaaagaccttccggaattatgacaacattacaggcacatccactgtagtatgcaagcctatagtcattgaaactcagctctatgttattgtggcccagctgtttggtggctctcacatctataagcgagacagttttgcaaataaattcataaaaatccaggatattgaaattctcaaaatccgaaaacccaatgacattgaaacattcaagattgaaaacaactggtactttgttgttgctgacagttcaaaagctggttttactaccatttacaaatggaacggaaacggattctactcccatcaatccttacacgcgtggtacagggacactgatgtggaatatctagaaatagtcagaacacctcagacactcagaacgcctcatttaattctgtctagtagttcccaacgtcctgtaatttatcagtggaacaaagcaacacaattattcactaaccaaactgacattcctaacatggaggatgtgtacgcagtgaagcacttctcagtgaaaggggacgtgtacatttgcttgacaagattcattggtgattccaaagtcatgaaatggggaggctcctcgttccaggatattcagaggatgccatcgcgaggatccatggtgttccagcctcttcaaataaataattaccaatatgcaattcttggaagtgattactcctttactcaagtgtataactgggatgcagagaaagccaaatttgtgaaatttcaggaattaaatgttcaggcaccaagatcattcacacatgtgtccattaataagcgtaattttctttttgcttccagttttaagggaaatacacagatttacaaacatgtcatagttgacttaagcgcatgagacaccaaattctgtggctgccatcagaaattttctacagtacatgacccggatgaactcaatgcatgatgactcttcttatcacacttgcaaatgaatgcctttcaaacattgagactgctagaaccaagcactaccagtatctccatccttaactgtccagtccagtgatgtgggaagttaccttttataagacaaaatttaattgtgtaactgttctttgcagtgaagatgtgtaaataagcgtttaatggtatctgttactccaaaaagaaatattaatatgtacttttccatttatttattcatgtgtacagaaacaactgccaaataaaatgtttacattttctttcataaaaaaaaaaaaaaaaaaa

SEQ ID NO: 121 - DNA, 1770 bp, Homo sapiens
gctgagtgtgagctgagcctgccccaccaccaagatgatcctgagcttgctgttcagccttgggggccccctgggctgggggctgctgggggcatgggcccaggcttccagtactagcctctctgatctgcagagctccaggacacctggggtctggaaggcagaggctgaggacaccagcaaggaccccgttggacgtaactggtgcccctacccaatgtccaagctggtcaccttactagctctttgcaaaacagagaaattcctcatccactcgcagcagccgtgtccgcaggagctccagactgccagaaagtcaaagtcatgtaccgcatggcccacaagccagtgtaccaggtcaagcagaaggtgctgacctctttggcctggaggtgctgccctggctacacgggccccaactgcgagcaccacgattccatggcaatccctgagcctgcagatcctggtgacagccaccaggaacctcaggatggaccagtcagcttcaaacctggccaccttgctgcagtgatcaatgaggttgaggtgcaacaggaacagcaggaacatctgctgggagatctccagaatgatgtgcaccgggtggcagacagcctgccaggcctgtggaaagccctgcctggtaacctcacagctgcagtgatggaagcaaatcaaacagggcacgaagttccctgatagatccttggagcaggtgctgctaccccacgtggacaccttcctacaagtgcatttcagccccatctggaggagctttaaccaaagcctgcacagccttacccaggccataagaaacctgtctcttgacgtggaggccaaccgccaggccatctccagagtccaggacagtgccgtggccagggctgacttccaggagcttggtgccaaatttgaggccaaggtccaggagaacactcagagagtgggtcagctgcgacaggacgtggaggaacgcctgcacgcccagcactttaccctgcaccgctcgatctcagagctccaagccgatgtggacaccaaattgaagaggctgcacaaggctcaggaggccccagggaccaatggcagtctggtgttggcaacgcctggggctggggcaaggcctgagccggacagcctgcaggccaggctgggccagctgcagaggaacctctcagagctgcacatgaccacggcccgcagggaggaggagttgcagtacaccctggaggacatgagggccaccctgacccggcacgtggatgagatcaaggaactgtactccgaatcggacgagactttcgatcagattagcaaggtggagcggcaggtggaggagctgcaggtgaaccacacggcgctccgtgagctgcgcgtgatcctgatggagaagtctctgatcatggaggagaacaaggaggaggtggagcggcagctcctggagctcaacctcacgctgcagcacctgcagggtggccatgccgacctcatcaagtacgtgaaggactgcaattgccagaagctctatttagacctggacgtcatccgggagggccagagggacgccacgcgtgccctggaggagacccaggtgagcctggacgagcggcggcagctggacggctcctccctgcaggccctgcagaacgccgtggacgccgtgtcgctggccgtggacgcgcacaaagcggagggcgagcgggcgcgggcggccacgtcgcggctccggagccaagtgcaggcgctggatgacgaggtgggcgcgctgaa

SEQ ID NO: 122 - DNA, 1356 bp, Homo sapiens
  SITE (1231): n equals a,t,g, or c
cccacgcgtccgaaagaatgttgtggctgctcttttttctggtgactgccattcatgctgaactctgtcaaccaggtgcagaaaatgcttttaaagtgagacttagtatcagaacagctctgggagataaagcatatgcctgggataccaatgaagaatacctcttcaaagcgatggtagctttctccatgagaaaagttcccaacagagaagcaacagaaatttcccatgtcctactttgcaatgtaacccagaggtatcattctggtttgtggttacagacccttcaaaaaatcacacccttcctgctgttgaggtgcaatcagccataagaatgaacaagaaccggatcaacaatgccttctttctaaatgaccaaactctggaatttttaaaaatcccttccacacttgcaccacccatggacccatctgtgcccatctggattattatatttggtgtgatattttgcatcatcatagttgcaattgcactactgattttatcagggatctggcaacgtagaagaaagaacaaagaaccatctgaagtggatgacgctgaagataagtgtgaaaacatgatcacaattgaaaatggcatcccctctgatcccctggacatgaagggagggcatattaatgatgccttcatgacagaggatgagaggctcacccctctctgaagggctgttgttctgcttcctcaagaaattaaacatttgtttctgtgtgactgctgagcatcctgaaataccaagagcagatcatatattttgtttcaccattcttcttttgtaataaattttgaatgtgcttgaaagtgaaaagcaatcaattatacccaccaacaccactgaaatcataagctattcacgactcaaaatattctaaaatatttttctgacagtatagtgtataaatgtggtcatgtggtatttgtagttattgatttaagcatttttagaaataagatcaggcatatgtatatattttcacacttcaaagacctaaggaaaaataaattttccagtggaggatacatataatatggtgtagaaatcattgaaaatggatcctttttgacgatcacttatatcactctgtatatgactaagtaaacaaaagtgagaagtaattattgtaaatggatggataaaattggaattactcatatacagggtgggattttatcctgttatcacaccaacagttgattatatattttctgnatatcagcccctaataggacaattctatttgttgaccatttctacaatttgtaaaagtccaatctgtgctaacttaataaagtaataatcatccaaaaaaaaaaaaaaaaaaaaaaaaaaaaaaa

SEQ ID NO: 123 - DNA, 1034 bp, Homo sapiens
ggcacgaggaaagtacgagtcggctcagcctggagggacccaaccagagcctggcctgggagccaggatggccatccacaaagccttggtgatgtgcctgggactgcctctcttcctgttcccaggggcctgggcccagggccatgtcccacccggctgcagccaaggcctcaaccccctgtactacaacctgtgtgaccgctctggggcgtggggcatcgtcctggaggccgtggctggggcgggcattgtcaccacgtttgtgctcaccatcatcctggtggccagcctcccctttgtgcaggacaccaagaaacggagcctgctggggacccagctaagaggccggtgtcaccatacagcgggtacaatgggcagctgctgaccagtgtgtaccagcccactgagatggccctgatgcacaaagttccgtccgaaggagcttacgacatcatcctcccacgggccaccgccaacagccaggtgatgggcagtgccaactcgaccctgcgggctgaagacatgtactcggcccagagccaccaggcggccacaccgccgaaagacggcaagaactctcaggtctttagaaacccctacgtgtgggactgagtcagcggtggcgaggagaggcggtcggatttggggagggccctgaggacctggccccgggcaagggactctccaggctcctcctccccctggcaggcccagcaacatgtgccccagatgtggaagggcctccctctctgccagtgtttgggtgggtgtcatgggtgtccccacccactcctcagtgtttgtggagtcgaggagccaaccccagcctcctgccaggatcacctcggcggtcacactccagccaaatagtgttctcggggtggtggctgggcagcgcctatgtttctctggagattcctgcaacctcaagagacttcccaggcgctcaggcctggatcttgctcctctgtgaggaacaagggtgcctaataaatacatttctgctttattaaaaaaaaaaaaaaaaaaaaaaa

SEQ ID NO: 124 - DNA, 1405 bp, Homo sapiens
  SITE (1403): n equals a,t,g, or c
  SITE (1404): n equals a,t,g, or c
  SITE (1405): n equals a,t,g, or c
gaattcggcacgaggcagctttggacatgtcgggcctcatagggagcatggggtgtggaagtggtggccgtgggctcaaaagctggctgcttagtttaccagctgtgtgatctcaagcagatcaccttcttcttcagagcctcagtttgcctgtcggtcatgccctgcctggaggccgtggccttgatcctgcttatcctgctggttccagacccaccccggggagctgccgagacacagggggagggggccgtgggaggcttcaggagcagctggtgtgaggacgtcagatacctggggaaaaactggagtttcgtgtggtcgayyctcrgagtgaccgccatggcctttgtgactggagccctggggttctgggcccccaagtttctgctcgaggcacgcgtggttcacgggctgcagcctccctgcttccaggagccgtgcagcaaccccgacagcctgatttttggggcactgaccatcatgaccggcgtcattggggtcatcttgggggcagaagctgcgaggaggtacaagaaagtcattccaggagctgagcccctcatctgcgcctccagcctgcttgccacagccccctgcctctacctggctctcgtcctggccccgaccaccctgctggcctcctatgtgttcctgggccttggggarctgcttctgtcctgcaactgggcagtggttgccgacatcctgctgtctgtggtggtgcccagatgccgggggacggcagaagcacttcagatcacggtggkycacatcctgggaracctggcagccctatctcacaggacttatctctagtgtcctgcgggccargcgccctgactcctatctgcagcgcttccgcagcctgsarcararctycctgtgctgcgcctttgtcatcgccctggggggcggctgcttcctgctgactgcgctgtacctggagagagacgagacccgggcctggcagmctgtcacagggaccccagacagcaatgatgtggacagcaatgacctggagagacaaggcctgctttcgggcgytggcgcctctacagaggagccctgaggtccctgcctgcactcgtcctgcctgcaagcctcccgttggtccccacagcagcagtgcctcggttcctctttggctgtcctcggggactccggctgaggcacatctgccacttttgaattcccggctggagagctggcaggaccctgtggctgggctgggaatggagctgtcagcactctgcgtgggaggcctgggcctgtgcctgcatcccgctcaaggctgccccagcctggggtccccagcctggctgctgctgggccctgrataaagagaggccagtacaaagcccatggattttgggcctgtaaaaaaaaaaaaaaaaaaaaannn

SEQ ID NO: 125 - DNA, 1133 bp, Homo sapiens
ggcacgagctggagcaaagatattgtttgaaggagagtttatggttttggattttaaacgggcagggtcttttttcctctcatttttgtggacaagagaggccttcgcctttatttttactctccctcttctgctgtccctgtgcagaggaaaaatgaagaattctcccagaagtgacttgtcaagacttaaaaaaaatgtttttaatgcatttcttccttgtctagtgcctcggtttatctctaacaggggctgtccagtatatcggtcctgttaggaggggagaaaaagttcttccaaaggctggagaagtgaacaaggagtcaaatttattttcccaattcaacttcataattatcatttctttggcttcatgctctcccgtaactcatgtggttgggatccatcccatctgggtcacttcagtctacttcacgtacttgaaaaggctttcctttacacttccaggaccaaacagcaacttcctgccacacacttccaccctatcactgggagaaatccttttctggacatgagcctttgacctgggtggggcagaaagaaccacaaactccatctcccaatagaactttgaaattcactcagcttttcctttcatgctgtttgttgcctgcttgttgcactcctcctgccccagaactgcaagatttttagcttcacccctttctgagagtaatgttatcttttatcagaatcagtatcagttcccctgtattctgtgcttcatcgaatttgcaagactgacctcttttaagcatttaattcactcccagagtcatctggtcaggttgcaatatgaggacttctctgtctcctctgaagcctgggacactgagcttacttaatacattagatgttcaaaagaggagcgttgtttcatctttcaaaatgttaggccattactttgagtataaaatcgacttattaatgattagtaatttttctaaagtattgggaaaactttcttattttataagatcttaacaagcttaaaaaagaattttatgaccagaatccaacaagagctctattttggaattgtgcccaagttggtgatgtttactctaaaattaataataaaactacttgtaagcaaaaaaaaaaaaaaaaaa

SEQ ID NO: 126 - DNA, 1016 bp, Homo sapiens
ggcacgagcttccgcggcatgatttccacccagcccggctccaccccactcgcttcctttaagatcctggctctggagtcggcagatgggcatggcggctgcagtgctggcaatgacattggcccctacggtgagcgggacgaccagcaagtgttcatccagaaggtggtgcccagtgccagccagctcttcgtgcgtctctcatctactgggcagcgggtgtgctccgtgcgctccgtggacggctcacccacgacagccttcacagtgctggagtgcgagggctccccggcggctcggctctcggccccggcgctacctgctcactggccaggccaacggcagcttggccatgtgggacctaaccaccgccatggacggcctcggccaggcccctgcaggtggcctgacggagcaagagctgatggaacagctggaacactgtgagctggccccgccggctcctttcagctccctcatggggctgtctccccagcccctcaccccgcatctccctcaccagcctccactcagcctccagcaacacctccttgtctggccaccgtgggagcccaagccccccgcaggctgaggcccggcgccgtggtgggggcagctttgtggaacgctgccaggaactggtgcggagtgggccagacctccgacggccacccacaccagccccgtggccctccagcggtctcggcactcccctcacacctcccaagatgaagctcaatgaaacttcctttttgaacaacgcagctgccatgatgccttgggatgccctggtcctgggggactcaggtgcctccctgattcctgtgggaaccccgggttcaggccagggcctccttggaataaatggttattgttactaggtccccaccttccctcttttctggaagccaaagtcaccctccccaataaagtcctcactgccaaaaaaaaaaaaaaaaaaaaaaaaaaaaaaaaaaaaaaaaaaaaaaaaaaaaaaaaaaaaaaaaaaaaaaaaa

SEQ ID NO: 127 - DNA, 1589 bp, Homo sapiens
cggcacgagctaagccataatagaaagaatggagaattattgattgaccgtctttattctgtgggctctgattctccaatgggaataccaagggatattatttttacagatggttttccatactggaacccaaaggtaaagacactcaaggacagacatttttggcagagcatagatgaaaatggcaagttccctggctttccttctgctcaactttcatgtctccctcctcttggtccagctgctcactccttgctcagctcagttttctgtgcttggaccctctgggcccatcctggccatggtgggtgaagacgctgatctgccctgtcacctgttcccgaccatgagtgcagagaccatggagctgaagtgggtaagttccagcctaaggcaggtggtgaacgtgtatgcagatggaaaggaagtggaagacaggcagagtgcaccgtatcgagggagaacttcgattctgcgggatggcatcactgcagggaaggctgctctccgaatacacaacgtcacagcctctgacagtggaaagtacttgtgttatttccaagatggtgacttctatgaaaaagccctggtggagctgaaggttgcagcactgggttctaatcttcacgttggaagtgaagggttatgaggatggagggatccatctggagtgcaggtccaccggctggtacccccaaccccaaatacagtggagcaacgccaagggagagaacatcccagctgtggaagcacctgtggttgcagatggagtgggcctatatgaagtagcagcatctgtgatcatgagaggcggctccggggagggtgtatcctgcatcatcagaaattccctcctcggcctggaaaagacagccagcatttccatcgcagacccttcttcaggagcgcccagccctggatcgcagccctggcagggaccctgcctatcttgctgctgcttctcgccggagccagttacttcttgtggagacaacagaaggaaataactgctctgtccagtgagatagaaagtgagcaagagatgaaagaaatgggatatgctgcaacagagcgggaaataagcctaagagagagcctccaggaggaactcaagagaaaaaaaatccagtacttgactcgtggagaggagtcttcgtccgataccaataagtcagcctgatgctctaatggaaaaatggcctcttcaagcctgggcctcccattggccaaacacagcagcaaaccagaggacaagggagcccagtggcactgtccatagaggacagattcctggggtccagaagagggtggagaaagctgaaggctggagagtgaatctagggcatataaggccccacacagagcccagcacagagacggccttgcagctatcaggaagatgaggagcttccttcatggcctgctgtgggctgagtaaataatatgattgccttctacagcgctagagattcatatgtttatccccatttttcaggtgaggaaatgcttcagatgaggctccaccttgttaaataaattggatgtatggaaaaatagactgcaaaaaaaaaaaaaaaaaaaaaaaaaaa

SEQ ID NO: 128 - DNA, 617 bp, Homo sapiens
ggcacagcacagcctgagatcttggggatccctcagcctaacacccacagacgtcagctggtggattcccgctgcatcaaggcctacccactgtctccatgctgggctctccctgccttctgtggctcctggccgtgaccttcttggttcccagagctcagcccttggcccctcaagactttgaagaagaggaggcagatgagactgagacggcgtggccgcctttgccggctgtcccctgcgactacgaccactgccgacacctgcaggtgccctgcaaggagctacagagggtcgggccggcggcctgcctgtgcccaggaytctccagccccgcccagccgcccgacccgccgcgcatgggagaagtgcgcattgcggccgaagagggccgcgcagtggtccactggtgtgcccccttctccccggtcctccactactggctgctgctttgggacggcagcgagstgcgcagaaggggcccgccgctgaacgctacggtccgcagagccgaactgaaggggctgaagccagggggcatttatgtcgtttgcgtagtggccgctaacgaggccggggcaagccgcgtgccccaggctggaggagagggcctcgag

SEQ ID NO: 129 - DNA, 645 bp, Homo sapiens
cccccccccccccccaagactgcaatgacaaatgctcacacaacaccgaggtcggggagacgcggagcagaactccagaaatgcctgccgtgtctgcgttctttagcctcgctgcgctggctgaagtggcagccatggaaaatgtgcacagaggtcagaggtcaactccgctcacccatgatggacagccaaaagaaatgccgcaggctcctgtacttatttcctgcgctgaccagtgaagcgccctttcattgtaaaacattgtgctttacctactaccctagccttgtctttaccgagggatgctagtgagtccaagtggtggaaaatatagactgcaaacaagtgcttgttgccccacacggcccagattcacttgaagcagaagttagcatcctgggccagtttgttctctcagaacccagaatctttgagggtaaggttatctgtctgatactgagcagaaacagaatgatcctggagctttgctttctattgaaggcttttgacggtaataggtggtaacttggtaaaaggctgcctttactgtagctcacccagcatctcttttaccaaccagagagtgtgaaactagtttcatatattacctagttattctttcaaaacaaaacaaaaaaaaaaaaa

SEQ ID NO: 130 - DNA, 974 bp, Homo sapiens
ggcacgagccacaactaccagaactggagggtgtacgacgtcttggtgctcaaaggatcccagttatctgcaagggctgcagatggatccccctgcaatgtcctcctgtgctctgtggtccccagcagacgcatggactctgtgacctggcaggaagggaagggtcccgtgaggggccgtgttcagtccttctggggcagtgaggctgccctgctcttggtgtgtcctggggaggggctttctgagcccaggagccgaagaccaagaatcatccgttgcctcatgactcacaacaaaggggtcagttttagcctggcagcctccatcgatgcttctcctgccctctgtgcccttccacggctgggacatgccttggattctgatgctgctgttcacaatgggccagggagttgtcatcctggccttcagatcgtgtctggaggcagaggtccgtggggttccaggcagaggaaaccgaagcggtgttaaaactgtggtggaagccccagcagtttttgcaaagaggccgtgaccacctgtggcgagggcagaccccagccaggcctggaacagatcaagctacctggaaaccccccagtgaccttgattcaccaacatccagcctgcgtcgcagcccatcattgcaatcaagtggagacagagtcggtgggagacgtgacttatccagcccacagggatgtacctgggagacctgtgcaacagcgccgtggcaagccatgtggcccctgcaggcattttggctgcagcagctaccgccctgacctgttttttgccaggactgtggagcggatagggggagtaggagtagagaagggaacaagggagcaagggaacaagggacatttgaacatttaatgtgagaagacaaacatcctttgtgagtcattaaaatttatgaaccacttaaaaaaaaaaaaaaaaaaaaaaaaaaaaaaaaaaaaaaaaaaaaaaaa

SEQ ID NO: 131 - DNA, 658 bp, Homo sapiens
  SITE (6): n equals a,t,g, or c
  SITE (15): n equals a,t,g, or c
acgacnagacaggtnaccggtaccggaattacccgggtacgaacccacgcgtaccgatatttcgtcatttaagaatatctacagatatgcctttgattttgcaagggataaagatcagagaagccttgatattgatactgctaaatctatgttagctcttctgcttgggaggacatggccactgttttcagtattttaccagtacctggagcaatcaaagtatcgtgttatgaacaaagatcaatggtacaatgtattagaattcagcagaacagtccatgctgatcttagtaactatgatgaagatggtgcttggcctgttcttcttgatgaatttgttgagtggcaaaaagtccgtcagacatcatagcaagaactatgtgaagaaaatgcaaacctttcaattcccacgtgtatacaagctaatgtgatgagggggaaaaaaatccaacgggtgcattttcattcatatgaaagacttctcatagtacttttttttcctttttttaaaggaggtttttcttgttacatgtgatgggcattgagccacacctcttcttagactgaatattgaagtttttgttttgagttatgtttataacatttatttcagaacaataaagattcagatttgtgacaaaaaaaaaaaaaaaaaaaa

SEQ ID NO: 132 - DNA, 1063 bp, Homo sapiens
ccacgcgtccgaggagaacaagtggactcgggtagcttctatgagtaccagaagactaggtgtggctgtggctgtgttaggagggttcttatatgctgtaggtggctctgacgggacatctcctctcaacacagtggaacgttacaatcctcaggaaaacagatggcacactatagcccctatggggacccggaggaaacacctaggctgtgcagtatatcaggacatgatctatgctgtaggaggtagagatgacactacagagctgagcagtgctgagagatacaaccccagaaccaaccagtggtctccagtggtggccatgacatcacgccgtagtggagttggcctggcagtggtcaatggacagctcatggcagtaggaggttttgatggcacaacatacttgaagaccatagaagtttttgatcctgatgccaatacatggaggttatatggcgggatgaattaccgtcggctagggggtggcgtaggagttattaaaatgacacattgtgaatcccatatttggtgaacacagagaagacagtcttgtatatattcctctgtattctggggagctttgaccttggagctttgtacagcttgagaaaacattagaacaaattttattatttgccggtgcctcaacaaatggaaatacaatccaatgaaagtacttcacctgcaagatgcacaataattttcaactctgtgcagaagaatatttatttttggttttaatttatcatggttttttgttgttttcgttttgaacttatccttcctcccacaaaaaaagaaaagaagaaaaaattccaagcagcaaaacttactttgtttgtaaggtattcatttaggtttgaaaatactatttaataagggcagaagggctatatatgatttggctattatttctagacactccatccacatgattccactaacaaggattaccaggaataaaggtaggtatgcaaaatgtattagctacccattattctcgcactaaccaccagaagacttgaaaatcttaaaaaaaaaaaacaaaaaaaaaaaaaaa

SEQ ID NO: 133 - DNA, 638 bp, Homo sapiens
ggcacgagagaggtcctggggtaagagaaaaaaagtagttatagcacttcgtccagcactgacagcagccgaacaaatgctgaaaatctgactgtgtgacagaacgtatcactgatgactgatagaaagccctctttcactctgattacccactcactacatgaagtcctgaaaataacagagaaactgttatatctttttaatgatttatttgcaagtattgagatttgacctgaaaaacaatgaaacacatgaacacacttccgattttctcctcgctgattagcttcctgcctgctgtcagtgctggacgaagtgctataactactttatgtaacattacagaacagctagaggtcctggggtaagagaaaaaaagcacatcacaacaaatgtgaaagccttcattattacacgttccagtttgtctcgctgtgtaggcataagctaatggtttattttcagaaagctgcctgaaacgttgctttgtattcttctaggaagaactttaattcctcctgaggaactctactttctgagccaaactgctaattttctgcggaactgtctagaagatcattcaagagaccctgcagttgcactttctcgtaaaagttaaaaaaaaaaaaaaaaaaaaa

SEQ ID NO: 134 - DNA, 356 bp, Homo sapiens
ccacgcgtccgtaaaactccacatttgtctgcatcagggaaaatgcatgggcacacatcctccctccctccctctctactctcctcccttccttcaggcctcttagcattgtttgttttcccatttctgatactactactccatgctgaagatttgccatattactattttggaaacattgagtgatagaactcctagaaaatttgcaaagaaatgttacatactgtatatcaaactctcagattctagtgttgaaaaagtagcctatactttgctattacttatacctgctgccatagaaaaaaaataagtttattcatgacacatttacatttgatcataaaaaaaaaaaaaaa

SEQ ID NO: 135 - protein, 197 aa, Homo sapiens
  SITE (197): Xaa equals stop translation
MKYLRHRRPNATLILAIGAFTLLLFSLLVSPPTCKVQEQPPAIPEALAWPTPPTRPAPAPCHANTSMVTHPDFATQPQHVQNFLLYRHCRHFPLLQDVPPSKCAQPVFLLLVIKSSPSNYVRRELLRRTWGRERKVRGLQLRLLFLVGTASNPHEARKVNRLLELEAQTHGDILQWDFHDSFFNLTLKQVRWTGVTX

SEQ ID NO: 136 - protein, 124 aa, Homo sapiens
  SITE (124): Xaa equals stop translation
MKLLLLALPMLVLLPQVIPAYSGEKKCWNRSGHCRKQCKDGEAVKDTCKNLRACCIPSNEDHRRVPATSPTPLSDSTPGIIDDILTVRFTTDYFEVSSKKDMVEESEAGRGTETSLPNVHHSSX

SEQ ID NO: 137 - protein, 353 aa, Homo sapiens
  SITE (353): Xaa equals stop translation
MLCRLCWLVSYSLAVLLLGCLLFLRKAAKPAETPRPTSLSGAPPTPRHSRCPPNHTVSSASLSLPSRHRLFLTYRHCRNFSILLEPSGCSKDTFLLLAIKSQPGHVERRAAIRSTWGRWGDGLGPALKLVFLLGVAGSAPPAQLLAYESREFDDILQWDFTEDFFNLTLKELHLQRWVVAACPQAHFMLKGDDDVFVHVPNVLEFLDGWDPAQDLLVGDVIRQALPNRNTKVKYFIPPSMYRATHYPPYAGGGGYVMSRATVRRLQAIMEDAELFPIDDVFVGMCLRRLGLSPMHHAGFKTFGIRRPLDPLDPCLYRGLLLVHRLSPLEMWTMWALVTDEGLKCAAGPIPQRX

SEQ ID NO: 138 - protein, 130 aa, Homo sapiens
  SITE (130): Xaa equals stop translation
MSASSLHRLPVLMALFPFQAAAAGSLGLQPPPTPMKGKPSIMLPPQYKRREGLKKKKKKIQKVALVSFGRADSIVGDGLPTNQGDKCQRERTMPGSKHISPQTPQVGKQARGSTNPSGRPGVQMLYSSIX

SEQ ID NO: 139 - protein, 549 aa, Homo sapiens
  SITE (132): Xaa equals any of the naturally occurring L-amino acids
  SITE (398): Xaa equals any of the naturally occurring L-amino acids
MGNACIPLKRIAYFLCLLSALLLTEGKKPAKPKCPAVCTCTKDNALCENARSIPRTVPPDVISLSFVRSGFTEISEGSFLFTPSLQLLLFTSNSFDVISDDAFIGLPHLEYLFIENNNIKSISRHTFRGLKXLIHLSLANNNLQTLPKDIFKGLDSLTNVDLRGNSFNCDCKLKWLVEWLGHTNATVEDIYCEGPPEYKKRKINSLSSKDFDCIITEFAKSQDLPYQSLSIDTFSYLNDEYVVIAQPFTGKCIFLEWDHVEKTFRNYDNITGTSTVVCKPIVIETQLYVIVAQLFGGSHIYKRDSFANKFIKIQDIEILKIRKPNDIETFKIENNWYFVVADSSKAGFTTIYKWNGNGFYSHQSLHAWYRDTDVEYLEIVRTPQTLRTPHLILSSSSXRPVIYQWNKATQLFTNQTDIPNMEDVYAVKHFSVKGDVYICLTRFIGDSKVMKWGGSSFQDIQRMPSRGSMVFQPLQINNYQYAILGSDYSFTQVYNWDAEKAKFVKFQELNVQAPRSFTHVSINKRNFLFASSFKGNTQIYKHVIVDLSA

SEQ ID NO: 140 - protein, 488 aa, Homo sapiens
  SITE (344): Xaa equals any of the naturally occurring L-amino acids
  SITE (416): Xaa equals any of the naturally occurring L-amino acids
  SITE (429): Xaa equals any of the naturally occurring L-amino acids
  SITE (430): Xaa equals any of the naturally occurring L-amino acids
MILSLLFSLGGPLGWGLLGAWAQASSTSLSDLQSSRTPGVWKAEAEDTSKDPVGRNWCPYPMSKLVTLLALCKTEKFLIHSQQPCPQGAPDCQKVKVMYRMAHKPVYQVKQKVLTSLAWRCCPGYTGPNCEHHDSMAIPEPADPGDSHQEPQDGPVSFKPGHLAAVINEVEVQQEQQEHLLGDLQNDVHRVADSLPGLWKALPGNLTAAVMEANQTGHEFPDRSLEQVLLPHVDTFLQVHFSPIWRSFNQSLHSLTQAIRNLSLDVEANRQAISRVQDSAVARADFQELGAKFEAKVQENTQRVGQLRQDVEERLHAQHFTLHRSISELQADVDTKLKRLHKAXEAPGTNGSLVLATPGAGARPEPDSLQARLGQLQRNLSELHMTTARREEELQYTLEDMRATLTRHVDEIKELXSESDETFDQISKXXRQVEELQVNHTALRELRVILMEKSLIMEENKEEVERQLLELNLTLQHLQGGMPTSSST

SEQ ID NO: 141 - protein, 222 aa, Homo sapiens
MLWLLFFLVTAIHAELCQPGAENAFKVRLSIRTALGDKAYAWDTNEEYLFKAMVAFSMRKVPNREATEISHVLLCNVTQRVSFWFVVTDPSKNHTLPAVEVQSAIRMNKNRINNAFFLNDQTLEFLKIPSTLAPPMDPSVPIWIIIFGVIFCIIIVAIALLILSGIWQRRRKNKEPSEVDDAEDKCENMITIENGIPSDPLDMKGGHINDAFMTEDERLTPL

SEQ ID NO: 142 - protein, 77 aa, Homo sapiens
  SITE (77): Xaa equals stop translation
MTKARLFRLWLVLGSVFMILLIIVYWDSAAPRTSTCTRPSLGRTRGRRCPRPGRTGQGAHGRLRCRRVSGQFLMLAX

SEQ ID NO: 143 - protein, 355 aa, Homo sapiens
  SITE (355): Xaa equals stop translation
MWRLWPGSPLVPLSWLWPARAAFLSGPWTLPPCLPDPLLAVPKCCLTLGIHLLPAWPGPPVGGGCSQLHRGCCYPGMGCLNRDLCPPSLVSRRWGDQLLWSPDGSKILATTPSAVFRVWEAQMWTCERWPTLSGRCQTGCWSPDGSRLLFTVLGEPLIYSLSFPERCGEGKGCVGGAKSATIVADLSETTIQTPDGEERLGGEAHSMVWDPSGERLAVLMKGKPRVQDGKPVILLFRTRNSPVFELLPCGIIQGEPGAQPQLITFHLPSTKGPCSVWAGPQAELPTSRCTLSMPSFHVLAQCLGGPRNPLLGVEALFMTCPSLLRHPQPLPLGTLSQGHHLFCPTPHIPTSKNKX

SEQ ID NO: 144 - protein, 90 aa, Homo sapiens
  SITE (90): Xaa equals stop translation
MCVCYFLVFLQIWARLSHLLVWIYPGAGLQPGKGHPAQSLFPHEHCHLMPQHSLTLKILEEKLGGKGESGSNFTFLHCKILATSALNFSX

SEQ ID NO: 145 - protein, 86 aa, Homo sapiens
  SITE (86): Xaa equals stop translation
MAHGPQSLWSLGFTVTLTFELPVGCVLGRICHPIQACNTGLMTPTPQGPCRTEMMSNDKPWLPANAPAHISLPGARLTSTCAPGLX

SEQ ID NO: 146 - protein, 400 aa, Homo sapiens
  SITE (400): Xaa equals stop translation
MAIHKALVMCLGLPLFLFPGAWAQGHVPPGCSQGLNPLYYNLCDRSGAWGIVLEAVAGAGIVTTFVLTIILVASLPFVQDTKKRSLLGTQVFFLLGTLGLFCLVFACVVKPDFSTCASRRFLFGVLFAICFSCLAAHVFALNFLARKNHGPRGWVIFTVALLLTLVEVIINTEWLIITLVRGSGEGGPQGNSSAGWAVASPCAIANMDFVMALIYVMLLLLGAFLGAWPALCGRYKRWRKHGVFVLLTTATSVAIWVVWIVMYTYGNKQHNSPTWDDPTLAIALAANAWAFVLFYVIPEVSQVTKSSPEQSYQGDMYPTRGVGYETILKEQKGQSMFVENKAFSMDEPVAAKRPVSPYSGYNGQLLTSVYQPTEMALMHKVPSEELTTSSSHGPPPTARX

SEQ ID NO: 147 - protein, 59 aa, Homo sapiens
  SITE (59): Xaa equals stop translation
MVLPFVLLFRPNFISVLHPLFYSHCLFLYLISPVHSSSIIYYKPDHCHYTPFIPGLLQX

SEQ ID NO: 148 - protein, 158 aa, Homo sapiens
  SITE (108): Xaa equals any of the naturally occurring L-amino acids
  SITE (156): Xaa equals any of the naturally occurring L-amino acids
  SITE (158): Xaa equals stop translation
MSWVGLGRRGHLLLLINPRALAGIRLPSPTGAPAPGPCPPLCTPHCSREHPAGGTGHPAGVWWRRGCYGGSCPMGPVRGILGGLPCREEALRRHHSKPCWRPGGQARXLGSWPLTAGREPPRTASTAPHTSEPTSSFPRFPRSQAWEDLPDAAHHXSX

SEQ ID NO: 149 - protein, 554 aa, Homo sapiens
  SITE (39): Xaa equals any of the naturally occurring L-amino acids
  SITE (199): Xaa equals any of the naturally occurring L-amino acids
  SITE (201): Xaa equals any of the naturally occurring L-amino acids
  SITE (202): Xaa equals any of the naturally occurring L-amino acids
  SITE (228): Xaa equals any of the naturally occurring L-amino acids
  SITE (420): Xaa equals any of the naturally occurring L-amino acids
  SITE (434): Xaa equals any of the naturally occurring L-amino acids
  SITE (440): Xaa equals any of the naturally occurring L-amino acids
  SITE (452): Xaa equals any of the naturally occurring L-amino acids
  SITE (554): Xaa equals stop translation
MKIATVSVLLPLALCLIQDAASKNEDQEMCHEFQAFMKXGKLFCPQDKKFFQSLDGIMFINKCATCKMILEKEAKSQKRARHLARAPKATAPTELNCDDFKKGERDGDFICPDYYEAVCGTDGKTYDNRCALCAENAKTGSQIGVKSEGECKSSNPEQDVCSAFRPFVRDGRLGCTRENDPVLGPDGKTHGNKCAMCAXLXXKEAENAKREGETRIRRNAEKDFCKEXEKQVRNGRLFCTRESDPVRGPDGRMHGNKCALCAEIFKQRFSEENSKTDQNLGKAEEKTKVKREIVKLCSQYQNQAKNGILFCTRENDPIRGPDGKMHGNLCSMCQAYFQAENEEKKKAEARARNKRESGKATSYAELCSEYRKLVRNGKLACTRENNPIQGPDGKVHGNTCSMCEVFFQAEEEEKKKKEGXSRNKRQSKSTASFXELCSEXRKSRKNGRLFCXRENDPIQGPDGKMHGNTCSMCEAFFQQEERARAKAKREAAKEICSEFRDQVRNGTLICTREHNPVRGPDGKMHGNKCAMCASVFKLEKKKKKKKKKKGRPLX

SEQ ID NO: 150 - protein, 308 aa, Homo sapiens
  SITE (308): Xaa equals stop translation
MNTVLLSLLFSLPRIVYAMAADGLFFQVFAHVHPRTQVPVAGTLAFGLLTAFLALLLDLESLVQFLSLGTLLAYTFVATSIIVLRFQKSSPPSSPGPASPGPLTKQQSSFSDHLQLVGTVHASVPEPGELKPALRPYLGFLDGYSPGAVVTWALGVMLASAITIGCVLVFGNSTLHLPHWGYILLLLLTSVMFLLSLLVLGAHQQQYREDLFQIPMVPLIPALSIVLNICLMLKLSYLTWVRFSIWLLMGLAVYFGYGIRHSKENQRELPGLNSTHYVVFPRGSLEETVQAMQPPSQAPAQDPGHMEX

SEQ ID NO: 151 - protein, 70 aa, Homo sapiens
  SITE (70): Xaa equals stop translation
MLLSKEHTSLGWLVIFLTLASQLISYGSRTGNSRCPPCLYRTLHTVSTSHVLSSLFVSTFSGDELVWTTX

SEQ ID NO: 152 - protein, 306 aa, Homo sapiens
  SITE (306): Xaa equals stop translation
MAAGLARLLLLLGLSAGGPAPAGAAKMKVVEEPNAFGVNNPFLPQASRLQAKRDPSPVSGPVHLFRLSGKCFSLVESTYKYEFCPFHNVTQHEQTFRWNAYSGILGIWHEWEIANNTFTGMWMRDGDACRSRSRQSKVELACGKSNRLAHVSEPSTCVYALTFETPLVCHPHALLVYPTLPEALQRQWDQVEQDLADELITPQGHEKLLRTLFEDAGYLKTPEENEPTQLEGGPDSLGFETLENCRKAHKELSKEIKRLKGLLTQHGIPYTRPTETSNLEHLGHETPRAKSPEQLRGDPGLRGSLX

SEQ ID NO: 153 - protein, 304 aa, Homo sapiens
MPCLEAVALILLILLVPDPPRGAAETQGEGAVGGFRSSWCEDVRYLGKNWSFVWSTLGVTAMAFVTGALGFWAPKFLLEARVVHGLQPPCFQEPCSNPDSLIFGALTIMTGVIGVILGAEAARRYKKVIPGAEPLICASSLLATAPCLYLALVLAPTTLLASYVFLGLGELLLSCNWAVVADILLSVVVPRCRGTAEALQITVGHILGDAGSPYLTGLISSVLRARRPDSYLQRFRSLQQSFLCCAFVIALGGGCFLLTALYLERDETRAWQPVTGTPDSNDVDSNDLERQGLLSGAGASTEEP

SEQ ID NO: 154 - protein, 231 aa, Homo sapiens
MLPGMPRFQWLSFFIFLDTLSLGIHLEKKTMTTVAGEKSWEKCQGVVDIPFRSKGMSRLGEEVNGEATESQQKPRNKKSKMDGMVPGNHQGRDPRKHKRKPLGVGYSARKSPLYDNCFLHAPDGQPLCTCDRRKAQWYLDKGIGELVSEEPFVVKLRFEPAGRPESPGDYYLMVKENLCVVCGKRDSYIRKNVIPHEYRKHFPIEMKDHNSHDVLLLCTSAMPFPTTMTTI

SEQ ID NO: 155 - protein, 174 aa, Homo sapiens
  SITE (150): Xaa equals any of the naturally occurring L-amino acids
  SITE (152): Xaa equals any of the naturally occurring L-amino acids
  SITE (174): Xaa equals stop translation
MGVPTAPEAGSWRWGSLLFALFLAASLDITAAALATGACIVESSASPSSCSWSTSKGRQPPTAVPRSWCGWTATFKGLKTPALKPHHLPRGYPRPKSGTPCPMWPSGSLLSLGGICFRSPAPPCLLQAPETSSSHPWTLSLTLQTLRSSXPXGGQWAVVAGSGAGAFEPGLALX

SEQ ID NO: 156 - protein, 64 aa, Homo sapiens
  SITE (64): Xaa equals stop translation
MFVLWVFKITYIYILFAKNKSLASCQMIAKVDLTFFVIMYIFIHTPNTLSDFCYFLGSTALRLX

SEQ ID NO: 157 - protein, 544 aa, Homo sapiens
  SITE (251): Xaa equals any of the naturally occurring L-amino acids
  SITE (257): Xaa equals any of the naturally occurring L-amino acids
MPPNLGNAGLLGRMLDEKTPPSPSGQPEEPGMVRLVCGHHNWIAVAYTQFLVCYRLKEASGWQLVFSSPRLDWPIERLALTARVHGGALGEHDKMVAAATGSEILLWALQAEGGGSEIGVFHLGVPVEALFFVGNQLIATSHTGRIGVWNAVTKHWQVQEVQPITSYDAAGSFLLLGCNNGSIYYVDVQKFPLRMKDNDLLVSELYRDPAEDGVTALSVYLTPKTSDSGNWIEIAYGTSSGGVRVIVQHPXTVGSGXQLFQTFTVHRSPVTKIMLSEKHLISVCADNNHVRTWSVTRFRGMISTQPGSTPLASFKILALESADGHGGCSAGNDIGPYGERDDQQVFIQKVVPSASQLFVRLSSTGQRVCSVRSVDGSPTTAFTVLECEGSRRLGSRPRRYLLTGQANGSLAMWDLTTAMDGLGQAPAGGLTEQELMEQLEHCELAPPAPSAPSWGCLPSPSPRISLTSLHSASSNTSLSGHRGSPSPPQAEARRRGGGSFVERCQELVRSGPDLRRPPTPAPWPSSGLGTPLTPPKMKLNETSF

SEQ ID NO: 158 - protein, 99 aa, Homo sapiens
  SITE (99): Xaa equals stop translation
MMNQHLLESFGSPSSLFIVFILLIWMLQRCKDFFLCCYRVVLTPSFWQKHQHPDPKIKHHLKLYSLKYSSSGQNNFRKDKHWLSGHTEEANLIKEEWKX

SEQ ID NO: 159 - protein, 43 aa, Homo sapiens
  SITE (43): Xaa equals stop translation
MISAQSSISWALIFIMAPALHLVLRFPSKFKPERKGEARSPKX

SEQ ID NO: 160 - protein, 114 aa, Homo sapiens
  SITE (114): Xaa equals stop translation
MWIAGPSWVPLRYVVWLMHLERICALHNCRGNMLSWPLQIRVAVLGCCTKTPAVGFLQVAGSPHSCQDPGPCSHSAAIFPPCERGLCGDGPRCVRGCVHCHRSLLHEPAWTQGX

SEQ ID NO: 161 - protein, 334 aa, Homo sapiens
MKMASSLAFLLLNFHVSLLLVQLLTPCSAQFSVLGPSGPILAMVGEDADLPCHLFPTMSAETMELKWVSSSLRQVVNVYADGKEVEDRQSAPYRGRTSILRDGITAGKAALRIHNVTASDSGKYLCYFQDGDFYEKALVELKVAALGSNLHVEVKGYEDGGIHLECRSTGWYPQPQIQWSNAKGENIPAVEAPVVADGVGLYEVAASVIMRGGSGEGVSCIIRNSLLGLEKTASISIADPFFRSAQPWIAALAGTLPILLLLLAGASYFLWRQQKEITALSSEIESEQEMKEMGYAATEREISLRESLQEELKRKKIQYLTRGEESSSDTNKSA

SEQ ID NO: 162 - protein, 89 aa, Homo sapiens
  SITE (89): Xaa equals stop translation
MWPSQVPLLAFCFLLVKSTSNINLPTPPPSSLENSSFVVSQRGNLIVFGGQKKATFRYHFYLDRMPFYSQISVYFVNGFRVNGYLCNNX

SEQ ID NO: 163 - protein, 197 aa, Homo sapiens
  SITE (197): Xaa equals stop translation
MAFRYLSWILFPLLGCYAVYSLLYLEHKGWYSWVLSMLYGFLLTFGFITMTPQLFINYKLKSVAHLPWRMLTYKALNTFIDDLFAFVIKMPVMYRIGCLRDDVVFFIYLYQRWIYRVDPTRVNEFGMSGEDPTAAAPVAEVPTAAGALTPTPAPTTTTATREEASTSLPTKPTQGASSASEPQEAPPKPAEDKKKDX

SEQ ID NO: 164 - protein, 129 aa, Homo sapiens
  SITE (129): Xaa equals stop translation
MYECFLSLSLLKSCKAVSGLMCLLLPRLGLLLLLPSERCFCWIPVYSLITCLAECSVVLRDPGFAGAFQVHRRQACFSTLRWSCLLLWWVSRVSAGRPLIGSPHMMAPSTFCPTVRGPGTCASSDPDGX

SEQ ID NO: 165 - protein, 61 aa, Homo sapiens
  SITE (61): Xaa equals stop translation
MTSSLFIFLFLWFCPPPRISFVLCWPQPHSQVHIQHEKADHLFQSLKQKAPGLLQWARIVX

SEQ ID NO: 166 - protein, 248 aa, Homo sapiens
  SITE (14): Xaa equals any of the naturally occurring L-amino acids
  SITE (141): Xaa equals any of the naturally occurring L-amino acids
  SITE (248): Xaa equals stop translation
MAVPALTPAAVRAXGLLGVSWTWALFTPLVALGREGGSQDSATTPSRPPGRPRIVDIATIVHCYAEERQSAEDYEKEESHRQRRLKERERIGELGAPEVWGPSPKFPQLDSDEHTPVEDEEEVTHQKSSSSDSNSEEHRKXKTSRSRNKKKRKNKSSKRKHRKYSDSDSNSESDTNSDSDDDKKRVKAKKKKKKKKHKTKKKKNKKTKKESSDSSCKDSEEDLSEATWDGAAKCGRYYGFNRARSTYX

SEQ ID NO: 167 - protein, 155 aa, Homo sapiens
  SITE (155): Xaa equals stop translation
MPAEKRIFGAVLLFSWTVYLWETFLAQRQRRIYKTTTHVPPELGQIMDSETFEKSRLYQLDKSTFSFWSGLYSETEGTLNLLFGGIPYLWRLSGRFCGYAGFGPEYEITQSLVFLLLATLFSALTGVPWSLYNTFVIKKTWLQSTDFGVLHMEIX

SEQ ID NO: 168 - protein, 107 aa, Homo sapiens
  SITE (107): Xaa equals stop translation
MSLSWMVHLLGLPNGTVWYLPFVCFTRGSPMGGGSGQWRWDRKFSKTLLGNLFVAFKEMCGEDIWMLAAILELRTQEWWKGRRNRVFVAVVKLLKFPSCQASCYMRX

SEQ ID NO: 169 - protein, 48 aa, Homo sapiens
  SITE (48): Xaa equals stop translation
MINEWCFKLLSLWSFAYSNCKLIHKCKFVFLKKKKTGKEVSVKGSKLX

SEQ ID NO: 170 - protein, 127 aa, Homo sapiens
  SITE (127): Xaa equals stop translation
MWLGSWLTSLLLSPYGSGWEKVPCCVTGHLRSCSCCLLGLAGVQSDHFSEGFFSEYSSDVLPWGRRSFLPQGDASLLACECFLHLQVVWGQFCLLEAWAGFTEGSMPAPSCRVHFWCRVNTCPFMSX

SEQ ID NO: 171 - protein, 87 aa, Homo sapiens
  SITE (87): Xaa equals stop translation
MLCGYVINNIWLIFTYFICIYISRSYIYITQETQVIYICQEMYDYFGENGPKCEKDIKKTKKTKKKHYFPLRNILYISKEEKLKDIX

SEQ ID NO: 172 - protein, 195 aa, Homo sapiens
  SITE (195): Xaa equals stop translation
MSTAFCPIHSSLGSMVMCLCILSPLCIASKSLRVCTKSYMEGHGKTRVPVVLVGNKADLSPEREVQAVEGKKLAESWGATFMESSARENQLTQGIFTKVIQEIARVGEFLWARASLPSHVSPWVWGNCLASAPGTCHVPVGGRSSGLHGYGCQLCSWPLDTQCGILMFAHFPQAPVAWMSMFTKGQGPLMDTGLX

SEQ ID NO: 173 - protein, 57 aa, Homo sapiens
  SITE (57): Xaa equals stop translation
MPLEESFEIVLKLVPLLGLELFFFLFIINGYINVYCPSQYFIYAKDSLAGLALIPQX

SEQ ID NO: 174 - protein, 41 aa, Homo sapiens
  SITE (41): Xaa equals stop translation
MVCFYALLLCFLSSVEIGPLSWLLCLSHIKCHFTALPFEAX

SEQ ID NO: 175 - protein, 75 aa, Homo sapiens
  SITE (75): Xaa equals stop translation
MLHLFCSQPLGLLFLLIFLGLDSLPRCLTATRLQSPIIIFSTLSCICSTSWLELCSVYFLTLNYLHVVPPCFLIX

SEQ ID NO: 176 - protein, 75 aa, Homo sapiens
  SITE (75): Xaa equals stop translation
MGVLTRELFGVVGMLYILIVGMVTWLDAFVKTHLMVMQNEYILFYVNYTSKLNFFKKFLLKSKDICGASCKFYCX

SEQ ID NO: 177 - protein, 58 aa, Homo sapiens
  SITE (58): Xaa equals stop translation
MKVLLSLSLVGLFIGFSDAVLNETCRFWINTSSKGNLQILKNQIQIIDRLRKMPASAX

SEQ ID NO: 178 - protein, 238 aa, Homo sapiens
MLGSPCLLWLLAVTFLVPRAQPLAPQDFEEEEADETETAWPPLPAVPCDYDHCRHLQVPCKELQRVGPAACLCPGLSSPAQPPDPPRMGEVRIAAEEGRAVVHWCAPFSPVLHYWLLLWDGSEAAQKGPPLNATVRRAELKGLKPGGIYVVCVVAANEAGASRVPQAGGEGLEGADIPAFGPCSRLAVPPNPRTLVHAAVGVGTALALLSCAALVWHFCLRDRWGCPRRAAARAAGAL

SEQ ID NO: 179 - protein, 46 aa, Homo sapiens
  SITE (46): Xaa equals stop translation
MTIHALLVYACNSKCLWFSISHLHFCLVTLLILTNMTESSFSLKGX

SEQ ID NO: 180 - protein, 58 aa, Homo sapiens
  SITE (58): Xaa equals stop translation
MVYRAFLIIILRFILIFLFKLNYSKLCPEIPFGLKFFSFVCIKVQIKKTSRKRRPYLX

SEQ ID NO: 181 - protein, 58 aa, Homo sapiens
  SITE (58): Xaa equals stop translation
MIVSYRIVSLPSSVLCLFIPPFLLIFYCLHSFVFSQMLYSWNYHVTFQMAFSLIICVX

SEQ ID NO: 182 - protein, 73 aa, Homo sapiens
  SITE (73): Xaa equals stop translation
MIVIYLTLTWTFLINLLACPLYHLPQMQKKAKPETKKAKPETKETIQRQRNLFLVLLKQLAGKKCSALFLIVX

SEQ ID NO: 183 - protein, 85 aa, Homo sapiens
  SITE (85): Xaa equals stop translation
MVWCQCLCPLCACWEEAQALWWPPLCTWPGEARGSGASLRLRPPLQNKLSPGVCLSLFLSPERNAGVPEASLQTKHPCTSYGSGX

SEQ ID NO: 184 - protein, 195 aa, Homo sapiens
  SITE (195): Xaa equals stop translation
MWVSLYFGILGLCSVITGGCIIFLHWRKNLRREEHAQQWVEVMRAATFTYSPLLYWINKRRRYGMNAAINTGPAPAVTKTETEVQNPDVLWDLDIPEGRSHADQDSNPKAEAPAPLQPALQLAPQQPQARSPFPLPIFQEVPFAPPLCNLPPLLNHSVSYPLATCPERNVLFHSLLNLAQEDHSFNAKPFPSELX

SEQ ID NO: 185 - protein, 42 aa, Homo sapiens
  SITE (42): Xaa equals stop translation
MLQRGQHLYLVVFLMVSFIPLLNPKQDLKKLKKNRTVRNHFX

SEQ ID NO: 186 - protein, 282 aa, Homo sapiens
  SITE (282): Xaa equals stop translation
MSILTMISSWPFSRVVRFWFLHQMVLDLCLGQGVPQQNLGKPKGKKKLSSVRQKFDHRFQPQNPLSGAQQFVAKDPQDDDDLKLCSHTMMLPTRGQLEGRMIVTAYEHGLDNVTEEAVSAVVYAVENHLKDILTSVVSRRKAYRLRDGHFKYAFGSNVTPQPYLKNSVVAYNNLIESPPAFTAPCAGQNPASHPPPDDAEQQAALLLACSGDTLPASLPPVNMYDLFEALQVHREVIPTHTVYALNIERIITKLWHPNHEELQQDKVHRQRLAAKEGLLLCX

SEQ ID NO: 187 - protein, 67 aa, Homo sapiens
  SITE (67): Xaa equals stop translation
MFVERWLPCFLVVAVVVWVFACGPVEDKEDSFGWSSYFLASGLPPLLFEASQTRTVRAGRLGVFVCX

SEQ ID NO: 188 - protein, 53 aa, Homo sapiens
  SITE (53): Xaa equals stop translation
MIFKLLIFRIFFHELALALCISNLVSLPWLSYFWCPEMQNLFLLDTHIWVLMX

SEQ ID NO: 189 - protein, 66 aa, Homo sapiens
  SITE (66): Xaa equals stop translation
MVLSVALLHALSHLMPCKTCLASTSPSAMIVSFLRPPQPAMWNCESIKPFLFIHYPVSGSIFIAVX

SEQ ID NO: 190 - protein, 57 aa, Homo sapiens
  SITE (57): Xaa equals stop translation
MVAILLRELPLAFLLVGSSGDKFCFTSSENVLLSFSFLKDIFAGYKNSGLMVLFIVX

SEQ ID NO: 191 - protein, 67 aa, Homo sapiens
  SITE (67): Xaa equals stop translation
MSNFISITCLVFTILGHLVSLQVAHSSVFEFKTLYVLKTNRYSQSLFRHFCHLSFIRTRKIFLKNNX

SEQ ID NO: 192 - protein, 49 aa, Homo sapiens
  SITE (49): Xaa equals stop translation
MMKYFFDVVVFLTFFLVFSLSIFLSDEEFPVSRTQNIGLCHFNPSFSEX

SEQ ID NO: 193 - protein, 48 aa, Homo sapiens
  SITE (48): Xaa equals stop translation
MPKTCLPILCLPLTQAVVLAQLNNFSSLNIFIFKIKNKMYYIWIYDKX

SEQ ID NO: 194 - protein, 59 aa, Homo sapiens
  SITE (59): Xaa equals stop translation
MWPCCLDSLLFGFWLWAQGITLLSEDSIRIVCSSCEPEVLHVPTPVYRPCPSHSPLTFX

SEQ ID NO: 195 - protein, 43 aa, Homo sapiens
  SITE (43): Xaa equals stop translation
MALQSIPSFTLLISFFLSTQCLRCVYNYECILFMAFNCRMVFX

SEQ ID NO: 196 - protein, 68 aa, Homo sapiens
  SITE (68): Xaa equals stop translation
MCTQILVFMLLIKCIFSINTHPIMPYLYMKNKVTMLYCYVLKFKSLFEKPSNWCFHYIMIHLDKTPNX

SEQ ID NO: 197 - protein, 89 aa, Homo sapiens
  SITE (89): Xaa equals stop translation
MLLLCLYCTFFLMPFIIKYTCFHLVFGQIPVTVHVNIWQHKNVTFFILHCGIPALTRDSAALTYSNDGTVIETLLFLILYLDLNIICCX

SEQ ID NO: 198 - protein, 77 aa, Homo sapiens
  SITE (77): Xaa equals stop translation
MTLYSKLLWLFKGELLFPLVLAYVLLLYIVTKFNYLILKLFPNKIQIKRGSIASNRSLESSASLPARKEEKLLKKFX

SEQ ID NO: 199 - protein, 42 aa, Homo sapiens
  SITE (42): Xaa equals stop translation
MNLSFLSFFLFFYLLWSPAESVYKKGMVKKNLSHSIVEKIKX

SEQ ID NO: 200 - protein, 46 aa, Homo sapiens
  SITE (46): Xaa equals stop translation
MNALPNLAWLPFVPALAAASPAGLAAPESRDVPFPVSPATQLNIGX

SEQ ID NO: 201 - protein, 42 aa, Homo sapiens
  SITE (42): Xaa equals stop translation
MLHLLCLGLHLVPPGLLSVNSLQSTQCSLFSAAKFFSIVQVX

SEQ ID NO: 202 - protein, 69 aa, Homo sapiens
  SITE (69): Xaa equals stop translation
MVASQAWWLSNLWHLWEVGSAQGLPLDPPALAPYLPWALRWPCFSGFASLAGALVLAHSLPTAWPGSSX

SEQ ID NO: 203 - protein, 48 aa, Homo sapiens
  SITE (48): Xaa equals stop translation
MYLFLLCCFISEHCAQHSFPHTCPNWKTRVLSFPLHPCPHLIHPNNTX

SEQ ID NO: 204 - protein, 57 aa, Homo sapiens
  SITE (57): Xaa equals stop translation
MLFVSLLVMWNLFLSSDFLFLWSVLGYYMKVRLPQSPREAHCVLLIDLKMIESLGGX

SEQ ID NO: 205 - protein, 56 aa, Homo sapiens
  SITE (56): Xaa equals stop translation
MEQLLAAVVFFSIFFLNLLALKMNKVYRCICLLFSKNMHTNVCFYKSNTHVIICMX

SEQ ID NO: 206 - protein, 58 aa, Homo sapiens
  SITE (58): Xaa equals stop translation
MCWKPKCILLLSFVFQCVASSTFDPLGSERPWSQPQCPISFPLLITGCCWFSMSRVSX

SEQ ID NO: 207 - protein, 59 aa, Homo sapiens
  SITE (59): Xaa equals stop translation
MRTFLTFVILKVILIFLSSCASFTRNLLTWPNDVSTEQFETRPFGSELLQTVINVSRTX

SEQ ID NO: 208 - protein, 45 aa, Homo sapiens
  SITE (45): Xaa equals stop translation
MRFFFQAYSQICVQNFLTFLLCIIIEFIAADFYNDSCCHVSLNNX

SEQ ID NO: 209 - protein, 45 aa, Homo sapiens
  SITE (41): Xaa equals any of the naturally occurring L-amino acids
  SITE (45): Xaa equals stop translation
MILFDLTFFLFAPRILASGACSCSIYPKITLPTKYFAFIIXTSFX

SEQ ID NO: 210 - protein, 44 aa, Homo sapiens
  SITE (44): Xaa equals stop translation
MPYMFRPAFLNCGTFAIFGQLNSVVGAVLCIAGCLAASLASTYX

SEQ ID NO: 211 - protein, 52 aa, Homo sapiens
MPAVSAFFSLAALAEVAAMENVHRGQRSTPLTHDGQPKEMPQLPVLISCADQ

SEQ ID NO: 212 - protein, 123 aa, Homo sapiens
  SITE (123): Xaa equals stop translation
MPPLAPQLCRAVFLVPILLLLQVKPLNGSPGPKDGSQTEKTPSADQNQEQFEEHFVASSVGEMWQVVDMAQQEEDQSSKTAAVHKHSFHLSFCFSLASVMVFSGGPLRRTFPNIQLCFMLTHX

SEQ ID NO: 213 - protein, 42 aa, Homo sapiens
  SITE (42): Xaa equals stop translation
MKQFGFGHPIKLLKTKLCRIVFYLVFFVWPQSSVIREATQTX

SEQ ID NO: 214 - protein, 56 aa, Homo sapiens
  SITE (56): Xaa equals stop translation
MVLAAPLVAFPCILLFAFSPSAVRDHVGDSRSDVPIFACLALASLALGSVLLVAFX

SEQ ID NO: 215 - protein, 86 aa, Homo sapiens
  SITE (86): Xaa equals stop translation
MKKVLLLITAILAVAVGFPVSQDQEREKRSISDSDELASGFFVFPYPYPFRPLPPIPFPRFPWFRRNFPIPIPESAPTTPLPSEKX

SEQ ID NO: 216 - protein, 45 aa, Homo sapiens
  SITE (45): Xaa equals stop translation
MICLCSIKMLLLFCQLTFALITCINLQSLYLFSYQQIIGIHSHVX

SEQ ID NO: 217 - protein, 51 aa, Homo sapiens
  SITE (5): Xaa equals any of the naturally occurring L-amino acids
  SITE (51): Xaa equals stop translation
MLSSXYVPMCQHFIYPVLWVLVHFFSFIQIQKNTDGSNVKLTRNPGTFISX

SEQ ID NO: 218 - protein, 56 aa, Homo sapiens
  SITE (56): Xaa equals stop translation
MAVRVLWGGLSLLRVLWCLLPQTGYVHPDEFFQSPEVMAGKTPHVWLRQAAAESAX

SEQ ID NO: 219 - protein, 127 aa, Homo sapiens
  SITE (127): Xaa equals stop translation
MCSSFPRMALCALWMWPSVKSSVPLPLREPFLWRSPGSQCLLCLQTIHVSCSEACPLLENISKNCTIPQRDLDNMAFPQALPLEKRCERFLQKSYRKLEKNPEKEEEHWARLQRYSLSLQRENFKKX

SEQ ID NO: 220 - protein, 70 aa, Homo sapiens
  SITE (70): Xaa equals stop translation
MPFQLPLQLLLLRLICEFFLAPALNCNLTGTVIFFTLMISLQLMIFFTLQFADGFQIGVDLQLSELNILX

SEQ ID NO: 221 - protein, 71 aa, Homo sapiens
  SITE (71): Xaa equals stop translation
MISGVLIFNLIASSWVLCFPLCDLSCQKTLRIFFASFFHAVCVHVSCTSWQPLVLFIKWWVVGCSPAVSLX

SEQ ID NO: 222 - protein, 52 aa, Homo sapiens
  SITE (52): Xaa equals stop translation
MDGLIMCLIIFQIVNFWLPCIILLGILNPTYKNYVMVSTKCWMKRTYEHMSX

SEQ ID NO: 223 - protein, 73 aa, Homo sapiens
  SITE (73): Xaa equals stop translation
MTFLFFFLFSRILCIKNLDLLTWKRSNPVIAKHLYCRGHITKKSKGPAQWTIYFSDVQYKISLPLKTLESPFX

SEQ ID NO: 224 - protein, 71 aa, Homo sapiens
  SITE (71): Xaa equals stop translation
MLFWKFGSFLFFCLPLTLFCILNERGIMHLEGGTLLNSLSHVRHYLRLRLSCFEKIPLHRSIFIFLLLLLX

SEQ ID NO: 225 - protein, 58 aa, Homo sapiens
  SITE (58): Xaa equals stop translation
MAGCCLKLFGVLSLCFLCGLISIERVICNPVSADFQVSTFCQRHCLLRSKVMFPIRGX

SEQ ID NO: 226 - protein, 59 aa, Homo sapiens
  SITE (59): Xaa equals stop translation
MRISRCNISLEIVSPSILLTFLDLIILLWALASCYRRFTSFPALNLPDVNSTLHYLQQX

SEQ ID NO: 227 - protein, 69 aa, Homo sapiens
  SITE (69): Xaa equals stop translation
MWLRGIHPFLWLSGIHSFPWLSGGPSLGTSSEQPTSLEDGKLICLFTDFSGSSFGLFMREAAKNISQMX

SEQ ID NO: 228 - protein, 53 aa, Homo sapiens
  SITE (53): Xaa equals stop translation
MLYDSNLCSVWHLYLILHLCKTFVYCGCVHSSYLISGTVNTQYFIVQTVLLFX

SEQ ID NO: 229 - protein, 57 aa, Homo sapiens
  SITE (57): Xaa equals stop translation
MRVKISYLMIALTVVGCIFMVIEGKKAAQRHETLTSLNLEKKARLKEEAAMKAKTEX

SEQ ID NO: 230 - protein, 130 aa, Homo sapiens
  SITE (130): Xaa equals stop translation
MHVLPLLLSLLLLLLLLSASFVTFSTPTSSRNSSCPDCESLNTGLPSLMMFGGSLLKWVQNTHGVESLLSSAKVRLLPPALGVLFPRLHPGTLTLVFLLIPFLTVSSSTSDVLSSLESPKLSVTIFHYCX

SEQ ID NO: 231 - protein, 180 aa, Homo sapiens
  SITE (24): Xaa equals any of the naturally occurring L-amino acids
  SITE (55): Xaa equals any of the naturally occurring L-amino acids
  SITE (73): Xaa equals any of the naturally occurring L-amino acids
  SITE (177): Xaa equals any of the naturally occurring L-amino acids
MWNSPGCRQHAGHLCGLGGGSRAXMSLTTYSTWGRTPVMVLQPCSRLLHHPGSPXPSGQASPRPWKTRKGIQXQTAGELFFVVGGIQRGRCRAVLVRCARSAPQLPELEGVRRLGAQRIPVICKGCRWIPLQCPPVLCGPQQTHGLCDLAGREGSREGRVQSFWGSEAALLLVCPGXGAF

SEQ ID NO: 232 - protein, 50 aa, Homo sapiens
MLILVTMMKMVLGLFFLMNLLSGKKSVRHHSKNYVKKMQTFQFPRVYKLM

SEQ ID NO: 233 - protein, 56 aa, Homo sapiens
  SITE (56): Xaa equals stop translation
MREKTGALPRCLGLLGVGLLWRWCGRRARAGVGKAWSATRSPSDSCFPGVARVGIX

SEQ ID NO: 234 - protein, 43 aa, Homo sapiens
  SITE (43): Xaa equals stop translation
MVAPLHLFIPFSWLVRTIGQLLSPVGKALSHRSNQMMPRSWGX

SEQ ID NO: 235 - protein, 41 aa, Homo sapiens
  SITE (41): Xaa equals stop translation
MRTSLFFFFFKNILVLCGTLLISRSSHSQSAPRGCWWPHKX

SEQ ID NO: 236 - protein, 42 aa, Homo sapiens
  SITE (42): Xaa equals stop translation
MLWKYFLSLFLPWYLYCFFNNNIMFYSLHSVPMFIQPFLLWX

SEQ ID NO: 237 - protein, 609 aa, Homo sapiens
MEGKPMRRCTNIRPGETGMDVTSRCTLGDPNKLPEGVPQPARMPYISDKHPRQTLEVINLLRKHRELCDVVLVVGAKKIYAHRVILSACSPYFRAMFTGELAESRQTEVVIRDIDERAMELLIDFAYTSQITVEEGNVQTLLPAACLLQLAEIQEACCEFLKRQLDPSNCLGIRAFADTHSCRELLRIADKFTQHNFQEVMESEEFMLLPANQLIDIISSDELNVRSEEQVFNAVMAWVKYSIQERRPQLPQVLQHVRLPLLSPKFLVGTVGSDPLIKSDEECRDLVDEAKNYLLLPQERPLMQGPRTRPRKPIRCGEVLFAVGGWCSGDAISSVERYDPQTNEWRMVASMSKRRCGVGVSVLDDLLYAVGGHDGSSYLNSVERYDPKTNQWSSDVAPTSTCRTSVGVAVLGGFLYAVGGQDGVSCLNIVERYDPKENKWTRVASMSTRRLGVAVAVLGGFLYAVGGSDGTSPLNTVERYNPQENRWHTIAPMGTRRKHLGCAVYQDMIYAVGGRDDTTELSSAERYNPRTNQWSPVVAMTSRRSGVGLAVVNGQLMAVGGFDGTTYLKTIEVFDPDANTWRLYGGMNYRRLGGGVGVIKMTHCESHIW

SEQ ID NO: 238 - protein, 52 aa, Homo sapiens
  SITE (52): Xaa equals stop translation
MACLIRFPAIGSLPYSTWPFFFFIFLFFSCLTFIPFSPLSSFCEPYPRKEPX

SEQ ID NO: 239 - protein, 130 aa, Homo sapiens
  SITE (130): Xaa equals stop translation
MFLLNFRYIMRFFFWPMLQAKLMSFHFLKPIIFMNSLILCLKQSCSCEVEISLLPLSQQTHRTDLGFSHSGSQNEPFLNLDKRAAEAHCAVMVLCLLGRDLKARRSREGPALCSSQVVICILKLARKRFX

SEQ ID NO: 240 - protein, 55 aa, Homo sapiens
  SITE (55): Xaa equals stop translation
MEFKLVRKIQIAILIFYLYLVAVAFKNKFSYKSFQFFGLESIFQNKKLKKEYLMX

SEQ ID NO: 241 - protein, 80 aa, Homo sapiens
  SITE (80): Xaa equals stop translation
MAAFFALAALVQVVYTIPAVLTLLVGLNPEVTGNVIWKSISAIHILFCTVWAVGLASYLLHRTQQNILHEEEGRSCLVWX

SEQ ID NO: 242 - protein, 166 aa, Homo sapiens
  SITE (59): Xaa equals any of the naturally occurring L-amino acids
METVILHTALMLKKRIVVYHPKIEAVQEFTRTLPALQMCTGYVAGFVDLEVSNRPDLYXVFVNLAESEITIAPLAKEAMAMGKLHKEMGQLIVQSAEDPEKSESHVIQDIALKTREIFTNLAPFSEVSADGEKRVLNLEALKQKRFPPATENFLYHLAAAEQMLKI

SEQ ID NO: 243 - protein, 77 aa, Homo sapiens
MFALSILISHCLLIYHMVNVKTPHLSASGKMHGHTSSLPPSLLSSLPSGLLALFVFPFLILLLHAEDLPYYYFGNIE

SEQ ID NO: 244 - protein, 67 aa, Homo sapiens
  SITE (67): Xaa equals stop translation
MGNACIPLKRIAYFLCLLSALLLTEGKKPANQNALPCVLVPKIMLYVRMPDPFHAPFLLMLSHYPLX

SEQ ID NO: 245 - protein, 114 aa, Homo sapiens
  SITE (114): Xaa equals stop translation
MILSLLFSLGGPLGWGLLGAWAQASSTSLSDLQSSRTPGVWKAEAEDTSKDPVGRNWCPYPMSKLVTLLALCKTEKFLIHSQQPCPQELQTARKSKSCTAWPTSQCTRSSRRCX

SEQ ID NO: 246 - protein, 105 aa, Homo sapiens
  SITE (105): Xaa equals stop translation
MLWLLFFLVTAIHAELCQPGAENAFKVRLSIRTALGDKAYAWDTNEEYLFKAMVAFSMRKVPNREATEISHVLLCNVTQRYHSGLWLQTLQKITPFLLLRCNQPX

SEQ ID NO: 247 - protein, 106 aa, Homo sapiens
  SITE (106): Xaa equals stop translation
MAIHKALVMCLGLPLFLFPGAWAQGHVPPGCSQGLNPLYYNLCDRSGAWGIVLEAVAGAGIVTTFVLTIILVASLPFVQDTKKRSLLGTQLRGRCHHTAGTMGSCX

SEQ ID NO: 248 - protein, 220 aa, Homo sapiens
  SITE (56): Xaa equals any of the naturally occurring L-amino acids
  SITE (58): Xaa equals any of the naturally occurring L-amino acids
  SITE (204): Xaa equals any of the naturally occurring L-amino acids
  SITE (209): Xaa equals any of the naturally occurring L-amino acids
  SITE (220): Xaa equals stop translation
MPCLEAVALILLILLVPDPPRGAAETQGEGAVGGFRSSWCEDVRYLGKNWSFVWSXLXVTAMAFVTGALGFWAPKFLLEARVVHGLQPPCFQEPCSNPDSLIFGALTIMTGVIGVILGAEAARRYKKVIPGAEPLICASSLLATAPCLYLALVLAPTTLLASYVFLGLGELLLSCNWAVVADILLSVVVPRCRGTAEALQITVXHILGXLAALSHRTYLX

SEQ ID NO: 249 - protein, 79 aa, Homo sapiens
  SITE (79): Xaa equals stop translation
MVLDFKRAGSFFLSFLWTREAFAFIFTLPLLLSLCRGKMKNSPRSDLSRLKKNVFNAFLPCLVPRFISNRGCPVYRSCX

SEQ ID NO: 250 - protein, 167 aa, Homo sapiens
  SITE (167): Xaa equals stop translation
MAAAVLAMTLAPTVSGTTSKCSSRRWCPVPASSSCVSHLLGSGCAPCAPWTAHPRQPSQCWSARAPRRLGSRPRRYLLTGQANGSLAMWDLTTAMDGLGQAPAGGLTEQELMEQLEHCELAPPAPFSSLMGLSPQPLTPHLPHQPPLSLQQHLLVWPPWEPKPPAGX

SEQ ID NO: 251 - protein, 156 aa, Homo sapiens
  SITE (156): Xaa equals stop translation
MASSLAFLLLNFHVSLLLVQLLTPCSAQFSVLGPSGPILAMVGEDADLPCHLFPTMSAETMELKWVSSSLRQVVNVYADGKEVEDRQSAPYRGRTSILRDGITAGKAALRIHNVTASDSGKYLCYFQDGDFYEKALVELKVAALGSNLHVGSEGLX

SEQ ID NO: 252 - protein, 173 aa, Homo sapiens
  SITE (76): Xaa equals any of the naturally occurring L-amino acids
  SITE (124): Xaa equals any of the naturally occurring L-amino acids
MLGSPCLLWLLAVTFLVPRAQPLAPQDFEEEEADETETAWPPLPAVPCDYDHCRHLQVPCKELQRVGPAACLCPGXSSPAQPPDPPRMGEVRIAAEEGRAVVHWCAPFSPVLHYWLLLWDGSEXRRRGPPLNATVRRAELKGLKPGGIYVVCVVAANEAGASRVPQAGGEGLE

SEQ ID NO: 253 - protein, 53 aa, Homo sapiens
  SITE (53): Xaa equals stop translation
MPAVSAFFSLAALAEVAAMENVHRGQRSTPLTHDGQPKEMPQAPVLISCADQX

SEQ ID NO: 254 - protein, 55 aa, Homo sapiens
  SITE (55): Xaa equals stop translation
MPWILMLLFTMGQGVVILAFRSCLEAEVRGVPGRGNRSGVKTVVEAPAVFAKRPX

SEQ ID NO: 255 - protein, 45 aa, Homo sapiens
  SITE (45): Xaa equals stop translation
MMKMVLGLFFLMNLLSGKKSVRHHSKNYVKKMQTFQFPRVYKLMX

SEQ ID NO: 256 - protein, 165 aa, Homo sapiens
  SITE (165): Xaa equals stop translation
MSTRRLGVAVAVLGGFLYAVGGSDGTSPLNTVERYNPQENRWHTIAPMGTRRKHLGCAVYQDMIYAVGGRDDTTELSSAERYNPRTNQWSPVVAMTSRRSGVGLAVVNGQLMAVGGFDGTTYLKTIEVFDPDANTWRLYGGMNYRRLGGGVGVIKMTHCESHIWX

SEQ ID NO: 257 - protein, 42 aa, Homo sapiens
  SITE (42): Xaa equals stop translation
MKHMNTLPIFSSLISFLPAVSAGRSAITTLCNITEQLEVLGX

SEQ ID NO: 258 - protein, 48 aa, Homo sapiens
  SITE (48): Xaa equals stop translation
MHGHTSSLPPSLLSSLPSGLLALFVFPFLILLLHAEDLPYYYFGNIEX

SEQ ID NO: 259 - protein, 32 aa, Homo sapiens
  SITE (9): Xaa equals any of the naturally occurring L-amino acids
PGRPTRPAXAGLSSGGAAQEAPQADPRPWLAR

SEQ ID NO: 260 - protein, 15 aa, Homo sapiens
GLGPAQVALSLQGPA

SEQ ID NO: 261 - protein, 82 aa, Homo sapiens
SSWMAGTQPRTSWWEMSSAKPCPTGTLRSNTSSHPQCTGPPTTHPMLVGEDMSCPEPQCGASRLSWKMLNSSPLMMSLWVCA

SEQ ID NO: 262 - protein, 23 aa, Homo sapiens
QPRTSWWEMSSAKPCPTGTLRSN

SEQ ID NO: 263 - protein, 23 aa, Homo sapiens
MSCPEPQCGASRLSWKMLNSSPL

SEQ ID NO: 264 - protein, 98 aa, Homo sapiens
WVALYIEGGMKYLTLVFLLGRAWRMTSPTRRSWAGSQPSRNSNTLGTWTKTSSSPFSMKWAWGQAATTQRCRCSSLSVRLKKSSVKSHWRMSSNSLLS

SEQ ID NO: 265 - protein, 20 aa, Homo sapiens
GGMKYLTLVFLLGRAWRMTS

SEQ ID NO: 266 - protein, 25 aa, Homo sapiens
SQPSRNSNTLGTWTKTSSSPFSMKW

SEQ ID NO: 267 - protein, 26 aa, Homo sapiens
TTQRCRCSSLSVRLKKSSVKSHWRMS

SEQ ID NO: 268 - protein, 17 aa, Homo sapiens
VHTKEIFRERSAGFPVK

SEQ ID NO: 269 - protein, 97 aa, Homo sapiens [sequence omitted]

SEQ ID NO: 270 - protein, 24 aa, Homo sapiens
FQPTKEINARGSEPCQAQSTSLPK

SEQ ID NO: 271 - protein, 27 aa, Homo sapiens
PKLPRWGSRPEAPQTPQGGLESRCCTP

SEQ ID NO: 272 - protein, 27 aa, Homo sapiens
RFKALTLGRAQWLTPVIQALSELRWVD

SEQ ID NO: 273 - protein, 146 aa, Homo sapiens
VHTKEIFRERSAGFPVKMSASSLHRLPVLMALFPFQAAAAGSLGLQPPPTPMKGKPSIMLPPQYKRREGLKKKKKKIQKVALVSFGRADSIVGDGLPTNQGDKCQRERTMPGSKHISPQTPQVGKQARGSTNPSGRPGVQMLYSSI

SEQ ID NO: 274 - protein, 176 aa, Homo sapiens
RIPLQSDGSFLHEKSSQQRSNRNFPCPTLQCNPEVSFWFVVTDPSKNHTLPAVEVQSAIRMNKNRINNAFFLNDQTLEFLKIPSTLAPPMDPSVPIWIIIFGVIFCIIIVAIALLILSGIWQRRRKNKEPSEVDDAEDKCENMITIENGIPSDPLDMKGGHINDAFMTEDERLTPL

SEQ ID NO: 275 - protein, 25 aa, Homo sapiens
PCPTLQCNPEVSFWFVVTDPSKNHT

SEQ ID NO: 276 - protein, 23 aa, Homo sapiens
AIRMNKNRINNAFFLNDQTLEFL

SEQ ID NO: 277 - protein, 24 aa, Homo sapiens
IWQRRRKNKEPSEVDDAEDKCENM

SEQ ID NO: 278 - protein, 19 aa, Homo sapiens
PLDMKGGHINDAFMTEDER

SEQ ID NO: 279 - protein, 136 aa, Homo sapiens
GSRTTALQRGVSLSSSVMKASLICPPFMSRGSEGMPFSIVIMFSHLSSASSTSDGSLFFLLRCQIPDKISSAIATMMMQNITPNIIIQMGTDGSMGGASVEGIFKNSRVWSFRKKALLIRFLFILMADCTSTAGRV

SEQ ID NO: 280 - protein, 28 aa, Homo sapiens
VSLSSSVMKASLICPPFMSRGSEGMPFS

SEQ ID NO: 281 - protein, 24 aa, Homo sapiens
SMGGASVEGIFKNSRVWSFRKKAL

SEQ ID NO: 282 - protein, 29 aa, Homo sapiens
GARGSQQDAPALQEAEVRGPERAQPARGR

SEQ ID NO: 283 - protein, 439 aa, Homo sapiens
SERPGEGPARPGQDDQGPAVPAVAGAGVGVHDPADHRVLGQRSAAHFYLHTSFSRPHTGPPLPTPGPDRTGSSRPTPMSTSFWTISHAGVKQSDLPRKETEQPPAPGEHGGERERLRLVPARRPAQPRPGPAAGGAEERAAGLLRQLQPGLPHQGARIRRHPQLGAEPPDRGRPARGHLLLRAQGGLHQLEARDDRAERKPAAPRCALPRPAAHPARARAQRQRAPDLQQVLAPLREALPPPHEGQAQEVHQVPLRARPLRAPDLRLPQQVRAGERGVLPQVRRAHAAGVRQPHQPARLGARGLPRWPQGVLRQLHPVPAGPAHGEAGALQRALAAGVPPLPPVPDRLRFLGKLETLDEDAAQLLQLLQVDRQSASPRATGTGPPAAGRRTGSPRSPWPGGSSCINSTRPTLFSSATPSPKTSSETESFRVAFSRVPGT

SEQ ID NO: 284 - protein, 25 aa, Homo sapiens
RPGQDDQGPAVPAVAGAGVGVHDPA

SEQ ID NO: 285 - protein, 21 aa, Homo sapiens
SRPHTGPPLPTPGPDRTGSSR

SEQ ID NO: 286 - protein, 23 aa, Homo sapiens
SHAGVKQSDLPRKETEQPPAPGE

SEQ ID NO: 287 - protein, 23 aa, Homo sapiens
RRPAQPRPGPAAGGAEERAAGLL

SEQ ID NO: 288 - protein, 23 aa, Homo sapiens
RRHPQLGAEPPDRGRPARGHLLL

SEQ ID NO: 289 - protein, 25 aa, Homo sapiens
RDDRAERKPAAPRCALPRPAAHPAR

SEQ ID NO: 290 - protein, 27 aa, Homo sapiens
RAPDLQQVLAPLREALPPPHEGQAQEV

SEQ ID NO: 291 - protein, 26 aa, Homo sapiens
DLRLPQQVRAGERGVLPQVRRAHAAG

SEQ ID NO: 292 - protein, 27 aa, Homo sapiens
QPARLGARGLPRWPQGVLRQLHPVPAG

SEQ ID NO: 293 - protein, 24 aa, Homo sapiens
AGVPPLPPVPDRLRFLGKLETLDE

SEQ ID NO: 294 - protein, 25 aa, Homo sapiens
QLLQLLQVDRQSASPRATGTGPPAA

SEQ ID NO: 295 - protein, 25 aa, Homo sapiens
NSTRPTLFSSATPSPKTSSETESFR

SEQ ID NO: 296 - protein, 324 aa, Homo sapiens
LGGKRTAGPPGVAAAAARRPRPESPASPGIVVDLARVAEAVHLPPVLVEGRQLLRVRVQQVLDEVGEGHLEASAEGLARRGGQAGVVGVHPQHGHGELAVELLVLQLELAAEGGDQAHEGVAHEEELGVLLELDLHEVAGELPVAAPELVEGQVRAGVVHVLARDAQRVAVGRTAVQQASAQHDHHALPVGAGHLGHVAVDGPVPVVHDQVAQLRVGDVVECALLGGEGQAGVGAEAPQHVPPLRLLPALVWAAPGVARGPVVASHALLHAPPAQAAAPSPFWEGHSASRQHEKLSRNSSTSESAVSSLSCPARAWAAAAPCAA

SEQ ID NO: 297 - protein, 23 aa, Homo sapiens
EAVHLPPVLVEGRQLLRVRVQQV

SEQ ID NO: 298 - protein, 24 aa, Homo sapiens
GHLEASAEGLARRGGQAGVVGVHP

SEQ ID NO: 299 - protein, 28 aa, Homo sapiens
QLELAAEGGDQAHEGVAHEEELGVLLEL

SEQ ID NO: 300 - protein, 27 aa, Homo sapiens
GELPVAAPELVEGQVRAGVVHVLARDA

SEQ ID NO: 301 - protein, 25 aa, Homo sapiens
AVQQASAQHDHHALPVGAGHLGHVA

SEQ ID NO: 302 - protein, 25 aa, Homo sapiens
HDQVAQLRVGDVVECALLGGEGQAG

SEQ ID NO: 303 - protein, 23 aa, Homo sapiens
ALVWAAPGVARGPVVASHALLHA

SEQ ID NO: 304 - protein, 28 aa, Homo sapiens
PPAQAAAPSPFWEGHSASRQHEKLSRNS

SEQ ID NO: 305 - protein, 314 aa, Homo sapiens
SRVTFPERRRSSRLRRGSMEESVRGYDWSPRDARRSPDQGRQQAERRNVLRGFCANSSLAFPTKERAFDDIPNSELSHLIVDDRHGAIYCYVPKVACTNWKRVMIVLSGSLLHRGAPYRDPLRIPREHVHNASAHLTFNKFWRRYGKLSRHLMKVKLKKYTKFLFVRDPFVRLISAFRSKFELENEEFYRKFAVPMLRVYANHTSLPASAREAFRAGLKVSFANFIQYLLDPHTEKLAPFNEHWRQVYRLCHPCQIDYDSWGSWRLWTRTPRSCCSYSRWTGSPLPPELPEQDRQQLGGGLVRQDPPGLEAAAV

SEQ ID NO: 306 - protein, 26 aa, Homo sapiens
RSPDQGRQQAERRNVLRGFCANSSLA

SEQ ID NO: 307 - protein, 28 aa, Homo sapiens
TKERAFDDIPNSELSHLIVDDRHGAIYC

SEQ ID NO: 308 - protein, 23 aa, Homo sapiens
FNKFWRRYGKLSRHLMKVKLKKY

SEQ ID NO: 309 - protein, 24 aa, Homo sapiens
FVRLISAFRSKFELENEEFYRKFA

SEQ ID NO: 310 - protein, 26 aa, Homo sapiens
TSLPASAREAFRAGLKVSFANFIQYL

SEQ ID NO: 311 - protein, 25 aa, Homo sapiens
SYSRWTGSPLPPELPEQDRQQLGGG

SEQ ID NO: 312 - protein, 6 aa, Homo sapiens
STGCSE

SEQ ID NO: 313 - protein, 146 aa, Homo sapiens
CLCLGCGLPELHSYLDPGPYLLVYPTLFWLCPSAVSPWAYTCYQLGLGPQWGAAALSFTVDAAIRVWDVSTETCVPLPWFRGGGVTNCSGPQTAAKSWLPLLQLSFESGRPRCGLVRGGLLYQGAVRLAAGAQMAADCCSLYWESH

SEQ ID NO: 314 - protein, 26 aa, Homo sapiens
YPTLFWLCPSAVSPWAYTCYQLGLGP

SEQ ID NO: 315 - protein, 25 aa, Homo sapiens
DVSTETCVPLPWFRGGGVTNCSGPQ

SEQ ID NO: 316 - protein, 22 aa, Homo sapiens
LLYQGAVRLAAGAQMAADCCSL

SEQ ID NO: 317 - protein, 155 aa, Homo sapiens
NKRKTYLFLEVGMWGVGQNRWWPWERVPRGRGWGCLSKEGQVMNRASTPSRGFLGPPKHWAKTWKLGIDKVQRDVGNSACGPAHTEQGPFVEGRWKVMSWGWAPGSPWIMPQGRSSNTGLFRVRKRRMTGLPSCTLGFPFISTARRSPLGSQTME

SEQ ID NO: 318 - protein, 26 aa, Homo sapiens
GVGQNRWWPWERVPRGRGWGCLSKEG

SEQ ID NO: 319 - protein, 26 aa, Homo sapiens
AKTWKLGIDKVQRDVGNSACGPAHTE

SEQ ID NO: 320 - protein, 42 aa, Homo sapiens
WAPGSPWIMPQGRSSNTGLFRVRKRRMTGLPSCTLGFPFIST

SEQ ID NO: 321 - protein, 17 aa, Homo sapiens
SSYQCPKVTFFKSSVDT

SEQ ID NO: 322 - protein, 51 aa, Homo sapiens
  SITE (3): Xaa equals any of the naturally occurring L-amino acids
  SITE (29): Xaa equals any of the naturally occurring L-amino acids
HYXSTPGRVPVRQFAAASTSGGPWVPGGXLEAPFQVAPSLSHSTPVFPGLI

SEQ ID NO: 323 - protein, 22 aa, Homo sapiens
ARGKYESAQPGGTQPEPGLGAR

SEQ ID NO: 324 - protein, 14 aa, Homo sapiens
YIYSYLGFFNQINK

SEQ ID NO: 325 - protein, 223 aa, Homo sapiens
  SITE (13): Xaa equals any of the naturally occurring L-amino acids
  SITE (14): Xaa equals any of the naturally occurring L-amino acids
  SITE (15): Xaa equals any of the naturally occurring L-amino acids
  SITE (27): Xaa equals any of the naturally occurring L-amino acids
  SITE (108): Xaa equals any of the naturally occurring L-amino acids
  SITE (113): Xaa equals any of the naturally occurring L-amino acids
  SITE (117): Xaa equals any of the naturally occurring L-amino acids
  SITE (121): Xaa equals any of the naturally occurring L-amino acids
  SITE (122): Xaa equals any of the naturally occurring L-amino acids
  SITE (125): Xaa equals any of the naturally occurring L-amino acids
  SITE (129): Xaa equals any of the naturally occurring L-amino acids
  SITE (130): Xaa equals any of the naturally occurring L-amino acids
ASTLAQTTGTCKXXXSSRRARSRTQRXFQLRPDKRSAPSLLQFIQAQEELSKENTGRQLAAREAVLALEGSTQLTGPVTQVAASKTHCSGMALTASPVPVLGAAPAKXPTQNXPGQXGRAXXKVXTSWXXVATKVLHGLEVSTHLGKRKLSGRSWLPGPALHATPSQSHTQTGSQIVHPPQGEVREVGRGRGQPPAQPVHAHPSQQHPSPAHLAGLSLWTGTA

SEQ ID NO: 326 - protein, 140 aa, Homo sapiens
  SITE (12): Xaa equals any of the naturally occurring L-amino acids
  SITE (59): Xaa equals any of the naturally occurring L-amino acids
  SITE (60): Xaa equals any of the naturally occurring L-amino acids
  SITE (80): Xaa equals any of the naturally occurring L-amino acids
  SITE (82): Xaa equals any of the naturally occurring L-amino acids
AMLETWRPGPSXGELATNSGQRASQDSQHSPPHVRAHLLISPLPAFPSMGGPAGRSAPXXLTETKSELQRLRRRQARASXSXPAGEPGAGHSDSFNCVPTNGQPLRSCSLSKLRRSFLKRTQGDSWLPEKQSWLWKAPPS

SEQ ID NO: 327 - protein, 122 aa, Homo sapiens
SHQSHLINPASSAKGSWAQLKAQPPAHVLGGTGQEGPPPTADQPESPGWDPSSFTNGSSGPRALPTSVHPTLQQGAPCRRNWAPCRGLVETRMLRRQLPHGTSKRDLGWASLQRGSPQETPQ

SEQ ID NO: 328 - protein, 35 aa, Homo sapiens
RPDKRSAPSLLQFIQAQEELSKENTGRQLAAREAV

SEQ ID NO: 329 - protein, 33 aa, Homo sapiens
ATPSQSHTQTGSQIVHPPQGEVREVGRGRGQPP

SEQ ID NO: 330 - protein, 29 aa, Homo sapiens
QDSQHSPPHVRAHLLISPLPAFPSMGGPA

SEQ ID NO: 331 - protein, 28 aa, Homo sapiens
DSFNCVPTNGQPLRSCSLSKLRRSFLKR

SEQ ID NO: 332 - protein, 25 aa, Homo sapiens
KGSWAQLKAQPPAHVLGGTGQEGPP

SEQ ID NO: 333 - protein, 26 aa, Homo sapiens
APSLLQFIQAQEELSKENTGRQLAAR

SEQ ID NO: 334 - protein, 6 aa, Homo sapiens
KPSHQP

SEQ ID NO: 335 - protein, 61 aa, Homo sapiens
STREPWLGSVFLHQRELRPQGPAHLCAPHTAAGSTLQEELGTLQGSGGDEDATEAAAPWDQ

SEQ ID NO: 336 - protein, 21 aa, Homo sapiens
CSYRPQFPVDPRVRATCIVFN

SEQ ID NO: 337 - protein, 128 aa, Homo sapiens
  SITE (46): Xaa equals any of the naturally occurring L-amino acids
  SITE (60): Xaa equals any of the naturally occurring L-amino acids
  SITE (66): Xaa equals any of the naturally occurring L-amino acids
GTENLLAPERTILSRAQMGKCMATPAPCVRSSSKQKKKKRKRRKVXQETKDNLRVQLPLXSCVVNXANPGKTDGFFAPERMTPSRAQMEKCMATPAPCVRPSFNKKKEQEQRLKEKLQRKSAVNFGTK

SEQ ID NO: 338 - protein, 26 aa, Homo sapiens
LLAPERTILSRAQMGKCMATPAPCVR

SEQ ID NO: 339 - protein, 24 aa, Homo sapiens
PGKTDGFFAPERMTPSRAQMEKCM

SEQ ID NO: 340 - protein, 17 aa, Homo sapiens
EQRLKEKLQRKSAVNFG

SEQ ID NO: 341 - protein, 186 aa, Homo sapiens
  SITE (42): Xaa equals any of the naturally occurring L-amino acids
  SITE (68): Xaa equals any of the naturally occurring L-amino acids
  SITE (69): Xaa equals any of the naturally occurring L-amino acids
KTLLENFSTQGTFVAMHPAVRATDWITLPCTKKPSISHLFFXFLAKILFSISSNSSFTLSLGIFSFFXXQLSTHCTLIAMRLPIRTKNRIIFPCASKSSISNKGPKSTAYILLWITALTFPFTFYTNLGPGFRILSTQCTSVVICFPICATNSFIIIRTDKIPISFSFFKIITIQLCWGSSLGSSC

SEQ ID NO: 342 - protein, 22 aa, Homo sapiens
MHPAVRATDWITLPCTKKPSIS

SEQ ID NO: 343 - protein, 17 aa, Homo sapiens
LIAMRLPIRTKNRIIFP

SEQ ID NO: 344 - protein, 26 aa, Homo sapiens
SSISNKGPKSTAYILLWITALTFPFT

SEQ ID NO: 345 - protein, 23 aa, Homo sapiens
IIIRTDKIPISFSFFKIITIQLC

SEQ ID NO: 346 - protein, 165 aa, Homo sapiens
  SITE (147): Xaa equals any of the naturally occurring L-amino acids
  SITE (153): Xaa equals any of the naturally occurring L-amino acids
NDGQCLAYNTTHYRERAMTSHARVSLGPSRDPLERPPFFFFFFFFFFFKFEHTGTHGTLVSMHFAIWATDRIMLPGAYKCSIPHLVPKFTADFLCSFSFSLCSCSFFLLKEGLTHGAGVAMHFSIWALDGVILSGAKKPSVFPGFAXFTTQLXKGSCTLRLSFVS

SEQ ID NO: 347 - protein, 22 aa, Homo sapiens
CLAYNTTHYRERAMTSHARVSL

SEQ ID NO: 348 - protein, 31 aa, Homo sapiens
GTLVSMHFAIWATDRIMLPGAYKCSIPHLVP

SEQ ID NO: 349 - protein, 24 aa, Homo sapiens
  SITE (18): Xaa equals any of the naturally occurring L-amino acids
  SITE (24): Xaa equals any of the naturally occurring L-amino acids
GVILSGAKKPSVFPGFAXFTTQLX

SEQ ID NO: 350 - protein, 141 aa, Homo sapiens
  SITE (26): Xaa equals any of the naturally occurring L-amino acids
  SITE (38): Xaa equals any of the naturally occurring L-amino acids
  SITE (44): Xaa equals any of the naturally occurring L-amino acids
  SITE (57): Xaa equals any of the naturally occurring L-amino acids
  SITE (58): Xaa equals any of the naturally occurring L-amino acids
KKASHMEQVLPCIFPSGPWMGSFSLXQKSRPFFLDLRXSLHNSXKEAVLLDCLLFLXXPSFFFFSSSSAWKKTSHMEQVLPCTFPSGPWIGLFSLVQASFPFLTSFRYSLQSSAYEVAFPDSLLFLARASAFFFSSFSAWK

SEQ ID NO: 351 - protein, 28 aa, Homo sapiens
  SITE (15): Xaa equals any of the naturally occurring L-amino acids
  SITE (27): Xaa equals any of the naturally occurring L-amino acids
CIFPSGPWMGSFSLXQKSRPFFLDLRXS

SEQ ID NO: 352 - protein, 28 aa, Homo sapiens
WIGLFSLVQASFPFLTSFRYSLQSSAYE

SEQ ID NO: 353 - protein, 79 aa, Homo sapiens
NSAVNIKIRQRMEYFSVPEKMTLFVVQMGKCMATCVPCVKPTSKQKMKKRKRLKHELETKENLEKQPHMQSFAVNIESL

SEQ ID NO: 354 - protein, 23 aa, Homo sapiens
IKIRQRMEYFSVPEKMTLFVVQM

SEQ ID NO: 355 - protein, 25 aa, Homo sapiens
VKPTSKQKMKKRKRLKHELETKENL

SEQ ID NO: 356 - protein, 23 aa, Homo sapiens
CPDYYEAVCGTDGKTYDNRCALC

SEQ ID NO: 357 - protein, 37 aa, Homo sapiens
CSAFRPFVRDGRLGCTRENDPVLGPDGKTHGNKCAMC

SEQ ID NO: 358 - protein, 37 aa, Homo sapiens
  SITE (4): Xaa equals any of the naturally occurring L-amino acids
CKEXEKQVRNGRLFCTRESDPVRGPDGRMHGNKCALC

SEQ ID NO: 359 - protein, 37 aa, Homo sapiens
CSQYQNQAKNGILFCTRENDPIRGPDGKMHGNLCSMC

SEQ ID NO: 360 - protein, 37 aa, Homo sapiens
CSEYRKLVRNGKLACTRENNPIQGPDGKVHGNTCSMC

SEQ ID NO: 361 - protein, 37 aa, Homo sapiens
  SITE (4): Xaa equals any of the naturally occurring L-amino acids
  SITE (16): Xaa equals any of the naturally occurring L-amino acids
CSEXRKSRKNGRLFCXRENDPIQGPDGKMHGNTCSMC

SEQ ID NO: 362 - protein, 37 aa, Homo sapiens
CSEFRDQVRNGTLICTREHNPVRGPDGKMHGNKCAMC

SEQ ID NO: 363 - protein, 63 aa, Homo sapiens
PRVRGTVVRLRQHRPSAYILVSTVLTLMVPWHSLDPDSALADAFYQRGYRWAGFIVAAGSICA

SEQ ID NO: 364 - protein, 25 aa, Homo sapiens
TVVRLRQHRPSAYILVSTVLTLMVP

SEQ ID NO: 365 - protein, 26 aa, Homo sapiens
WHSLDPDSALADAFYQRGYRWAGFIV

SEQ ID NO: 366 - protein, 101 aa, Homo sapiens
TPSCSASSSPCHALSMPWPPMGSSSRCLPMCTPGHRCLWRAPWRSGSSRPSWHCCWTWSRWFSSCPLAHSWPTHSWPPVSLCCASRSLPRPAPQAQPALAP

SEQ ID NO: 367 - protein, 24 aa, Homo sapiens
LSMPWPPMGSSSRCLPMCTPGHRC

SEQ ID NO: 368 - protein, 27 aa, Homo sapiens
APWRSGSSRPSWHCCWTWSRWFSSCPL

SEQ ID NO: 369 - protein, 22 aa, Homo sapiens
THSWPPVSLCCASRSLPRPAPQ

SEQ ID NO: 370 - protein, 60 aa, Homo sapiens
AYILVSTVLTLMVPWHSLDPDSALADAFYQRGYRWAGFIVAAGSICAMNTVLLSLLFSLP

SEQ ID NO: 371 - protein, 31 aa, Homo sapiens
PWHSLDPDSALADAFYQRGYRWAGFIVAAGS

SEQ ID NO: 372 - protein, 27 aa, Homo sapiens
RIVYAMAADGLFFQVFAHVHPRTQVPV

SEQ ID NO: 373 - protein, 16 aa, Homo sapiens
DLESLVQFLSLGTLLA

SEQ ID NO: 374 - protein, 15 aa, Homo sapiens
YTFVATSIIVLRFQK

SEQ ID NO: 375 - protein, 31 aa, Homo sapiens
LTKQQSSFSDHLQLVGTVHASVPEPGELKPA

SEQ ID NO: 376 - protein, 50 aa, Homo sapiens
LRPYLGFLDGYSPGAVVTWALGVMLASAITIGCVLVFGNSTLHLPHWGYI

SEQ ID NO: 377 - protein, 27 aa, Homo sapiens
PGAVVTWALGVMLASAITIGCVLVFGN

SEQ ID NO: 378 - protein, 53 aa, Homo sapiens
GAHQQQYREDLFQIPMVPLIPALSIVLNICLMLKLSYLTWVRFSIWLLMGLAV

SEQ ID NO: 379 - protein, 26 aa, Homo sapiens
MVPLIPALSIVLNICLMLKLSYLTWV

SEQ ID NO: 380 - protein, 29 aa, Homo sapiens
YFGYGIRHSKENQRELPGLNSTHYVVFPR

SEQ ID NO: 381 - protein, 370 aa, Homo sapiens
PRVRGTVVRLRQHRPSAYILVSTVLTLMVPWHSLDPDSALADAFYQRGYRWAGFIVAAGSICAMNTVLLSLLFSLPRIVYAMAADGLFFQVFAHVHPRTQVPVAGTLAFGLLTAFLALLLDLESLVQFLSLGTLLAYTFVATSIIVLRFQKSSPPSSPGPASPGPLTKQQSSFSDHLQLVGTVHASVPEPGELKPALRPYLGFLDGYSPGAVVTWALGVMLASAITIGCVLVFGNSTLHLPHWGYILLLLLTSVMFLLSLLVLGAHQQQYREDLFQIPMVPLIPALSIVLNICLMLKLSYLTWVRFSIWLLMGLAVYFGYGIRHSKENQRELPGLNSTHYVVFPRGSLEETVQAMQPPSQAPAQDPGHME

SEQ ID NO: 382 - protein, 6 aa, Homo sapiens
ARDLIL

SEQ ID NO: 383 - protein, 43 aa, Homo sapiens
LTFYLQFLAPKDKPSGDTAAVFEEGGDVDDLVSTFNMHLVFCD

SEQ ID NO: 384 - protein, 25 aa, Homo sapiens
FLAPKDKPSGDTAAVFEEGGDVDDL

SEQ ID NO: 385 - protein, 15 aa, Homo sapiens
HASAHASAHASGCGA

SEQ ID NO: 386 - protein, 118 aa, Homo sapiens
QGVGVADEGGLERQRVDAGARLGHMGQPVAFSTRQLHLALPAPGTAGVTVPHPHAREGVVGDLPLVPDAEDPTVGVPAEGLLVLGHVVERAELILVRGLHQAEALARESEEMHGSRHG

SEQ ID NO: 387 - protein, 25 aa, Homo sapiens
EGGLERQRVDAGARLGHMGQPVAFS

SEQ ID NO: 388 - protein, 29 aa, Homo sapiens
LALPAPGTAGVTVPHPHAREGVVGDLPLV

SEQ ID NO: 389 - protein, 28 aa, Homo sapiens
PAEGLLVLGHVVERAELILVRGLHQAEA

SEQ ID NO: 390 - protein, 125 aa, Homo sapiens
  SITE (32): Xaa equals any of the naturally occurring L-amino acids
HLFKFFYTIAFMQWFTEFMELFLSVWELIKTXNLCFVCFSEHKPGQLVPAGPTSQLLCRALGRVHLCSPTTRSQTPTQSWVTPQLLWRLGSGRLVAQVLQVGSFCGPRVGDAVLGEQTFQPFDLL

SEQ ID NO: 391 - protein, 29 aa, Homo sapiens
  SITE (23): Xaa equals any of the naturally occurring L-amino acids
AFMQWFTEFMELFLSVWELIKTXNLCFVC

SEQ ID NO: 392 - protein, 26 aa, Homo sapiens
RSQTPTQSWVTPQLLWRLGSGRLVAQ

SEQ ID NO: 393 - protein, 22 aa, Homo sapiens
  SITE (21): Xaa equals any of the naturally occurring L-amino acids
GGCFLLTALYLERDETRAWQXV

SEQ ID NO: 394 - protein, 219 aa, Homo sapiens
  SITE (56): Xaa equals any of the naturally occurring L-amino acids
  SITE (58): Xaa equals any of the naturally occurring L-amino acids
  SITE (204): Xaa equals any of the naturally occurring L-amino acids
  SITE (209): Xaa equals any of the naturally occurring L-amino acids
MPCLEAVALILLILLVPDPPRGAAETQGEGAVGGFRSSWCEDVRYLGKNWSFVWSXLXVTAMAFVTGALGFWAPKFLLEARVVHGLQPPCFQEPCSNPDSLIFGALTIMTGVIGVILGAEAARRYKKVIPGAEPLICASSLLATAPCLYLALVLAPTTLLASYVFLGLGELLLSCNWAVVADILLSVVVPRCRGTAEALQITVXHILGXLAALSHRTYL

SEQ ID NO: 395 - protein, 343 aa, Homo sapiens
GAWGVEVVAVGSKAGCLVYQLCDLKQITFFFRASVCLSVMPCLEAVALILLILLVPDPPRGAAETQGEGAVGGFRSSWCEDVRYLGKNWSFVWSTLGVTAMAFVTGALGFWAPKFLLEARVVHGLQPPCFQEPCSNPDSLIFGALTIMTGVIGVILGAEAARRYKKVIPGAEPLICASSLLATAPCLYLALVLAPTTLLASYVFLGLGELLLSCNWAVVADILLSVVVPRCRGTAEALQITVGHILGDAGSPYLTGLISSVLRARRPDSYLQRFRSLQQSFLCCAFVIALGGGCFLLTALYLERDETRAWQPVTGTPDSNDVDSNDLERQGLLSGAGASTEEP

SEQ ID NO: 396 - protein, 13 aa, Homo sapiens
ARAGAKILFEGEF

SEQ ID NO: 397 - protein, 92 aa, Homo sapiens
NFEIHSAFPFMLFVACLLHSSCPRTARFLASPLSESNVIFYQNQYQFPCILCFIEFARLTSFKHLIHSQSHLVRLQYEDFSVSSEAWDTELT

SEQ ID NO: 398 - protein, 26 aa, Homo sapiens
FPFMLFVACLLHSSCPRTARFLASPL

SEQ ID NO: 399 - protein, 26 aa, Homo sapiens
NVIFYQNQYQFPCILCFIEFARLTSF

SEQ ID NO: 400 - protein, 23 aa, Homo sapiens
SQSHLVRLQYEDFSVSSEAWDTE

SEQ ID NO: 401 - protein, 78 aa, Homo sapiens [sequence omitted]

SEQ ID NO: 402 - protein, 10 aa, Homo sapiens
QKFLCASDGD

SEQ ID NO: 403 - protein, 177 aa, Homo sapiens
  SITE (160): Xaa equals any of the naturally occurring L-amino acids
  SITE (162): Xaa equals any of the naturally occurring L-amino acids
AEVPLRVRRRHGRPHGPGGRQLALGIPALRSLPGCVPRHHGCSPGYGCLHRRILCLPLILLLVYKQRQAASNRRAQELVRMDSNIQGIENPGFEASPPAQGIPEAKVRHPLSYVAQRQPSESGRHLLSEPSTPLSPPGPGDVFFPSLDPVPDSPNFEVIXPXWGTVGCCGWVWGRCI

SEQ ID NO: 404 - protein, 27 aa, Homo sapiens
GPGGRQLALGIPALRSLPGCVPRHHGC

SEQ ID NO: 405 - protein, 25 aa, Homo sapiens
FEASPPAQGIPEAKVRHPLSYVAQR

SEQ ID NO: 406 - protein, 88 aa, Homo sapiens [sequence omitted]

SEQ ID NO: 407 - protein, 78 aa, Homo sapiens [sequence omitted]

SEQ ID NO: 408 - protein, 22 aa, Homo sapiens
PVDRSSEKLLVGGSWGRWRWPV

SEQ ID NO: 409 - protein, 25 aa, Homo sapiens
TKRKSDRRAASGKTGEPSACHGGEV

SEQ ID NO: 410 - protein, 46 aa, Homo sapiens
MTSKFGESGTGSRDGKKTSPGPGGDRGVLGSESRCRPDSEGCRWAT

SEQ ID NO: 411 - protein, 20 aa, Homo sapiens
SPGPGGDRGVLGSESRCRPD

SEQ ID NO: 412 - protein, 23 aa, Homo sapiens
PPSQAPDTGHGGETSPPWHALGS

SEQ ID NO: 413 - protein, 15 aa, Homo sapiens
HEVQPSYLPSNSGLI

SEQ ID NO: 414 - protein, 78 aa, Homo sapiens
HEVQPSYLPSNSGLIMFVLWVFKITYIYILFAKNKSLASCQMIAKVDLTFFVIMYIFIHTPNTLSDFCYFLGSTALRL

SEQ ID NO: 415 - protein, 148 aa, Homo sapiens
GTSFRGMISTQPGSTPLASFKILALESADGHGGCSAGNDIGPYGERDDQQVFIQKVVPSASQLFVRLSSTGQRVCSVRSVDGSPTTAFTVLECEGSPAARLSAPALPAHWPGQRQLGHVGPNHRHGRPRPGPCRWPDGARADGTAGTL

SEQ ID NO: 416 - protein, 29 aa, Homo sapiens
PGSTPLASFKILALESADGHGGCSAGNDI

SEQ ID NO: 417 - protein, 24 aa, Homo sapiens
GERDDQQVFIQKVVPSASQLFVRL

SEQ ID NO: 418 - protein, 25 aa, Homo sapiens
RSVDGSPTTAFTVLECEGSPAARLS

SEQ ID NO: 419 - protein, 26 aa, Homo sapiens
PALPAHWPGQRQLGHVGPNHRHGRPR

SEQ ID NO: 420 - protein, 610 aa, Homo sapiens
  SITE (317): Xaa equals any of the naturally occurring L-amino acids
  SITE (323): Xaa equals any of the naturally occurring L-amino acids
VPALSPPVAVRRLQLREELDRSSCGNVLFNGYLPPPVFPVKRRNRHSLVGPQQLGGRPAPVRRSNTMPPNLGNAGLLGRMLDEKTPPSPSGQPEEPGMVRLVCGHHNWIAVAYTQFLVCYRLKEASGWQLVFSSPRLDWPIERLALTARVHGGALGEHDKMVAAATGSEILLWALQAEGGGSEIGVFHLGVPVEALFFVGNQLIATSHTGRIGVWNAVTKHWQVQEVQPITSYDAAGSFLLLGCNNGSIYYVDVQKFPLRMKDNDLLVSELYRDPAEDGVTALSVYLTPKTSDSGNWIEIAYGTSSGGVRVIVQHPXTVGSGXQLFQTFTVHRSPVTKIMLSEKHLISVCADNNHVRTWSVTRFRGMISTQPGSTPLASFKILALESADGHGGCSAGNDIGPYGERDDQQVFIQKVVPSASQLFVRLSSTGQRVCSVRSVDGSPTTAFTVLECEGSRRLGSRPRRYLLTGQANGSLAMWDLTTAMDGLGQAPAGGLTEQELMEQLEHCELAPPAPSAPSWGCLPSPSPRISLTSLHSASSNTSLSGHRGSPSPPQAEARRRGGGSFVERCQELVRSGPDLRRPPTPAPWPSSGLGTPLTPPKMKLNETSF

SEQ ID NO: 421 - protein, 166 aa, Homo sapiens
MAAAVLAMTLAPTVSGTTSKCSSRRWCPVPASSSCVSHLLGSGCAPCAPWTAHPRQPSQCWSARAPRRLGSRPRRYLLTGQANGSLAMWDLTTAMDGLGQAPAGGLTEQELMEQLEHCELAPPAPFSSLMGLSPQPLTPHLPHQPPLSLQQHLLVWPPWEPKPPAG

SEQ ID NO: 422 - protein, 95 aa, Homo sapiens [sequence omitted]

SEQ ID NO: 423 - protein, 22 aa, Homo sapiens
ICSLTFLEATNLQSRCQQAMLP

SEQ ID NO: 424 - protein, 26 aa, Homo sapiens
GLWLQHSNLCLNHHMTFLVYLLCVSV

SEQ ID NO: 425 - protein, 22 aa, Homo sapiens
LRISVLCRETACNWSHHPLDSN

SEQ ID NO: 426 - protein, 32 aa, Homo sapiens
LTVTVRNPGSTHASGRPRRRSGVWARRGLVWQ

SEQ ID NO: 427 - protein, 145 aa, Homo sapiens
LTVTVRNPGSTHASGRPRRRSGVWARRGLVWQMWIAGPSWVPLRYVVWLMHLERICALHNCRGNMLSWPLQIRVAVLGCCTKTPAVGFLQVAGSPHSCQDPGPCSHSAAIFPPCERGLCGDGPRCVRGCVHCHRSLLHEPAWTQG

SEQ ID NO: 428 - protein, 6 aa, Homo sapiens
CVHCHR

SEQ ID NO: 429 - protein, 38 aa, Homo sapiens
TPCSAQFSVLGPSGPILAMVGEDADLPCHLFPTMSAET

SEQ ID NO: 430 - protein, 60 aa, Homo sapiens
MELKWVSSSLRQVVNVYADGKEVEDRQSAPYRGRTSILRDGITAGKAALRIHNVTASDSG

SEQ ID NO: 431 - protein, 26 aa, Homo sapiens
LEVKGYEDGGIHLECRSTGWYPQPQI

SEQ ID NO: 432 - protein, 80 aa, Homo sapiens
MASSLAFLLLNFHVSLLLVQLLTPCSAQFSVLGPSGPILAMVGEDADLPCHLFPTMSAETMELKWVSSSLRQVVNVYADG

SEQ ID NO: 433 - protein, 103 aa, Homo sapiens [sequence omitted]

SEQ ID NO: 434 - protein, 24 aa, Homo sapiens
LLIDRLYSVGSDSPMGIPRDIIFT

SEQ ID NO: 435 - protein, 25 aa, Homo sapiens
NPKVKTLKDRHFWQSIDENGKFPGF

SEQ ID NO: 436 - protein, 24 aa, Homo sapiens
LGPAAHSLLSSVFCAWTLWAHPGH

SEQ ID NO: 437 - protein, 135 aa, Homo sapiens
RLQHWVLIFTLEVKGYEDGGIHLECRSTGWYPQPQIQWSNAKGENIPAVEAPVVADGVGLYEVAASVIMRGGSGEGVSCIIRNSLLGLEKTASISIADPSSGAPSPGSQPWQGPCLSCCCFSPEPVTSCGDNRRK

SEQ ID NO: 438 - protein, 25 aa, Homo sapiens
GGIHLECRSTGWYPQPQIQWSNAKG

SEQ ID NO: 439 - protein, 27 aa, Homo sapiens
PQIQWSNAKGENIPAVEAPVVADGVGL

SEQ ID NO: 440 - protein, 27 aa, Homo sapiens
NIPAVEAPVVADGVGLYEVAASVIMRG

SEQ ID NO: 441 - protein, 27 aa, Homo sapiens
SGAPSPGSQPWQGPCLSCCCFSPEPVT

SEQ ID NO: 442 - protein, 131 aa, Homo sapiens
SSSICDHERRLRGGCILHHQKFPPRPGKDSQHFHRRPFFRSAQPWIAALAGTLPILLLLLAGASYFLWRQQKEITALSSEIESEQEMKEMGYAATEREISLRESLQEELKRKKIQYLTRGEESSSDTNKSA

SEQ ID NO: 443 - protein, 28 aa, Homo sapiens
KDSQHFHRRPFFRSAQPWIAALAGTLPI

SEQ ID NO: 444 - protein, 28 aa, Homo sapiens
EIESEQEMKEMGYAATEREISLRESLQE

SEQ ID NO: 445 - protein, 33 aa, Homo sapiens
VNNMIAFYSARDSYVYPHFSGEEMLQMRLHLVK

SEQ ID NO: 446 - protein, 38 aa, Homo sapiens; identical to SEQ ID NO: 429

SEQ ID NO: 447 - protein, 23 aa, Homo sapiens
KWVSSSLRQVVNVYADGKEVEDR

SEQ ID NO: 448 - protein, 25 aa, Homo sapiens
RTSILRDGITAGKAALRIHNVTASD

SEQ ID NO: 449 - protein, 23 aa, Homo sapiens
CYFQDGDFYEKALVELKVAALGS

SEQ ID NO: 450 - protein, 23 aa, Homo sapiens
GYEDGGIHLECRSTGWYPQPQIQ

SEQ ID NO: 451 - protein, 23 aa, Homo sapiens
NIPAVEAPVVADGVGLYEVAASV

SEQ ID NO: 452 - protein, 21 aa, Homo sapiens
QQKEITALSSEIESEQEMKEM

SEQ ID NO: 453 - protein, 24 aa, Homo sapiens
LRESLQEELKRKKIQYLTRGEESS

SEQ ID NO: 454 - protein, 13 aa, Homo sapiens
GEEMLQMRLHLVK

SEQ ID NO: 455 - protein, 40 aa, Homo sapiens
SAQFSVLGPSGPILAMVGEDADLPCHLFPTMSAETMELKW

SEQ ID NO: 456 - protein, 155 aa, Homo sapiens
MASSLAFLLLNFHVSLLLVQLLTPCSAQFSVLGPSGPILAMVGEDADLPCHLFPTMSAETMELKWVSSSLRQVVNVYADGKEVEDRQSAPYRGRTSILRDGITAGKAALRIHNVTASDSGKYLCYFQDGDFYEKALVELKVAALGSNLHVGSEGL

SEQ ID NO: 457 - protein, 12 aa, Homo sapiens
PQGGLTLPSVWG

SEQ ID NO: 458 - protein, 106 aa, Homo sapiens
GGPCHLWLLGPRRTQLPGRRASLPFRSQGELTQAFLLGLWKHQMPALTQEQQVRAERRREAVRMEIPGLFFASLANWGLLYRTSQDFISPYLCAAPSTPHPPLGGP

SEQ ID NO: 459 - protein, 23 aa, Homo sapiens
GPRRTQLPGRRASLPFRSQGELT

SEQ ID NO: 460 - protein, 24 aa, Homo sapiens
QMPALTQEQQVRAERRREAVRMEI

SEQ ID NO: 461 - protein, 25 aa, Homo sapiens
ANWGLLYRTSQDFISPYLCAAPSTP

SEQ ID NO: 462 - protein, 34 aa, Homo sapiens
LSFKDKSTYIESSTKVYDDMAFRYLSWILFPLLG

SEQ ID NO: 463 - protein, 31 aa, Homo sapiens
LLTFGFITMTPQLFINYKLKSVAHLPWRMLT

SEQ ID NO: 464 - protein, 30 aa, Homo sapiens
TYKALNTFIDDLFAFVIKMPVMYRIGCLRD

SEQ ID NO: 465 - protein, 30 aa, Homo sapiens
DVVFFIYLYQRWIYRVDPTRVNEFGMSGED

SEQ ID NO: 466 - protein, 44 aa, Homo sapiens
VAGIFPRLSFKDKSTYIESSTKVYDDMAFRYLSWILFPLLGCYA

SEQ ID NO: 467 - protein, 19 aa, Homo sapiens
WAAMPSTVFCTWSTRAGTP

SEQ ID NO: 468 - protein, 28 aa, Homo sapiens
PWVAGIFPRLSFKDKSTYIESSTKVYDD

SEQ ID NO: 469 - protein, 88 aa, Homo sapiens
AGEDSCHPVLSVQPDVHDLGWQESSPAYPSRTSPRISSPRPKCMMIWHSGTCPGSSSRSWAAMPSTVFCTWSTRAGTPGCSACSTASC

SEQ ID NO: 470 - protein, 30 aa, Homo sapiens
LSVQPDVHDLGWQESSPAYPSRTSPRISSP

SEQ ID NO: 471 - protein, 25 aa, Homo sapiens
GSSSRSWAAMPSTVFCTWSTRAGTP

SEQ ID NO: 472 - protein, 22 aa, Homo sapiens
CYAVYSLLYLEHKGWYSWVLSM

SEQ ID NO: 473 - protein, 12 aa, Homo sapiens
LGEFLSSQCFLP

SEQ ID NO: 474 - protein, 78 aa, Homo sapiens
  SITE (3): Xaa equals any of the naturally occurring L-amino acids
  SITE (46): Xaa equals any of the naturally occurring L-amino acids
  SITE (48): Xaa equals any of the naturally occurring L-amino acids
  SITE (65): Xaa equals any of the naturally occurring L-amino acids
RGXPSWPMHTLVYAQHSTTHTPLIQPQWTQVIDQPPGITHQFCVRXCXCPTLESCVQECVTRSRXKPTTGVPGPQRLA

SEQ ID NO: 475 - protein, 24 aa, Homo sapiens
TPLIQPQWTQVIDQPPGITHQFCV

SEQ ID NO: 476 - protein, 104 aa, Homo sapiens
ALGPSQTCDLDVWLVAKPSFFRGPQGIHYFSLWRRKPLSHWVSIWQLQGQETMPAMLRSRPAGQATVATGPPRGSPSPQDLPSYHRKQVESSHRHSWEPASQSQ

SEQ ID NO: 477 - protein, 28 aa, Homo sapiens
CDLDVWLVAKPSFFRGPQGIHYFSLWRR

SEQ ID NO: 478 - protein, 28 aa, Homo sapiens
AGQATVATGPPRGSPSPQDLPSYHRKQV

SEQ ID NO: 479 - protein, 97 aa, Homo sapiens
PFPLLPPKRRGLLYHLIQKSTLGLVVWFREHLDSRSQMTSSLFIFLFLWFCPPPRISFVLCWPQPHSQVHIQHEKADHLFQSLKQKAPGLLQWARIV

SEQ ID NO: 480 - protein, 30 aa, Homo sapiens
YRESCTLQYRPEFPGRPTRPRGSCPQYPGP

SEQ ID NO: 481 - protein, 155 aa, Homo sapiens
  SITE (72): Xaa equals any of the naturally occurring L-amino acids
GKLYAAVPSGIPGSTHASARLMPPVSRSSYSEDIVGSRRRRRSSSGSPPSPQSRCSSWDGCSRSHSRGREGXRPPWSELDVGALYPFSRSGSRGRLPRFRNYAFASSWSTSYSGYRYHRALLCRRTAVSGRLREGREPSAEEAEGEREDWGIGSA

SEQ ID NO: 482 - protein, 23 aa, Homo sapiens
SGIPGSTHASARLMPPVSRSSYS

SEQ ID NO: 483 - protein, 29 aa, Homo sapiens
  SITE (13): Xaa equals any of the naturally occurring L-amino acids
GCSRSHSRGREGXRPPWSELDVGALYPFS

SEQ ID NO: 484 - protein, 25 aa, Homo sapiens
TAVSGRLREGREPSAEEAEGEREDW

SEQ ID NO: 485 - protein, 134 aa, Homo sapiens
  SITE (17): Xaa equals any of the naturally occurring L-amino acids
  SITE (77): Xaa equals any of the naturally occurring L-amino acids
RIRKAAVQIPTRKNIGXRRPVVQETRKKERISRLKESIGNILIVTVTQSLTQILTLMMIKRELKPRRKRRKRNTKQXKRRIRKPKKNPVTQAVKTQKRTCQKLPGMEQPNVADTMDLIGPEAPINTYLFKMKNL

SEQ ID NO: 486 - protein, 28 aa, Homo sapiens
TRKKERISRLKESIGNILIVTVTQSLTQ

SEQ ID NO: 487 - protein, 28 aa, Homo sapiens
VKTQKRTCQKLPGMEQPNVADTMDLIGP

SEQ ID NO: 488 - protein, 326 aa, Homo sapiens
  SITE (1): Xaa equals any of the naturally occurring L-amino acids
  SITE (5): Xaa equals any of the naturally occurring L-amino acids
  SITE (15): Xaa equals any of the naturally occurring L-amino acids
  SITE (93): Xaa equals any of the naturally occurring L-amino acids
  SITE (220): Xaa equals any of the naturally occurring L-amino acids
XGDTXTQNSRHDTPXLIDYYRESCTLQYRPEFPGRPTRPRGSCPQYPGPAIPRTSWALGEGDAAPRGAHHPRRADVPLGMAVPALTPAAVRAXGLLGVSWTWALFTPLVALGREGGSQDSATTPSRPPGRPRIVDIATIVHCYAEERQSAEDYEKEESHRQRRLKERERIGELGAPEVWGPSPKFPQLDSDEHTPVEDEEEVTHQKSSSSDSNSEEHRKXKTSRSRNKKKRKNKSSKRKHRKYSDSDSNSESDTNSDSDDDKKRVKAKKKKKKKKHKTKKKKNKKTKKESSDSSCKDSEEDLSEATWDGAAKCGRYYGFNRARSTY

SEQ ID NO: 489 - protein, 20 aa, Homo sapiens
RSRRNRVAMGMWASLDALWE

SEQ ID NO: 490 - protein, 92 aa, Homo sapiens [sequence omitted]

SEQ ID NO: 491 - protein, 24 aa, Homo sapiens
GGMGAGIGVGPSERTDIAVTPRGR

SEQ ID NO: 492 - protein, 26 aa, Homo sapiens
GCGHRWTLCGRCRPRSVSSGPCCSFP

SEQ ID NO: 493 - protein, 24 aa, Homo sapiens
KKHGFNQQTLGFFTWKYNKNKNLV

SEQ ID NO: 494 - protein, 21 aa, Homo sapiens
PKLLPCSPAEGHTSLGPLLPF

SEQ ID NO: 495 - protein, 70 aa, Homo sapiens
  SITE (6): Xaa equals any of the naturally occurring L-amino acids
ASLELXPSKSQLSTEWGFTWIVGLGMSPSTALWTECTCTPFLVLLSHASGHFFWLSPLASLVIPPVTDRK

SEQ ID NO: 496 - protein, 32 aa, Homo sapiens
WGFTWIVGLGMSPSTALWTECTCTPFLVLLSH

SEQ ID NO: 497 - protein, 106 aa, Homo sapiens
VAVGVCREDVMGITDRSKMSPDVGIWAIYWSAAGYWPLIGFPGTPTQQEPALHRVGVYLDRGTGNVSFYSAVDGVHLHTFSCSSVSRLRPFFLVESISIFSHSTSD

SEQ ID NO: 498 - protein, 27 aa, Homo sapiens
ITDRSKMSPDVGIWAIYWSAAGYWPLI

SEQ ID NO: 499 - protein, 30 aa, Homo sapiens
RGTGNVSFYSAVDGVHLHTFSCSSVSRLRP

SEQ ID NO: 500 - protein, 11 aa, Homo sapiens
GTRGLQNHRTE

SEQ ID NO: 501 - protein, 6 aa, Homo sapiens
ELSGLG

SEQ ID NO: 502 - protein, 80 aa, Homo sapiens
LPFTLKPKMVKIPFSSRLINNNLQYIDCILSLKRCEEILLMWHGLLLCLASVFLELRGDRPPLLASLLEPHKMPLHSSSL

SEQ ID NO: 503 - protein, 24 aa, Homo sapiens
LKPKMVKIPFSSRLINNNLQYIDC

SEQ ID NO: 504 - protein, 23 aa, Homo sapiens
SLKRCEEILLMWHGLLLCLASVF

SEQ ID NO: 505 - protein, 21 aa, Homo sapiens
LRGDRPPLLASLLEPHKMPLH

SEQ ID NO: 506 - protein, 79 aa, Homo sapiens
LQMHTGSGFKGKSCEVAFYVAQAEKPGEGAYLHGAQETQKQGIEADHATLRGSPHSVSKTKYNLYIANYYLLAWRKMES

SEQ ID NO: 507 - protein, 20 aa, Homo sapiens
CEVAFYVAQAEKPGEGAYLH

SEQ ID NO: 508 - protein, 23 aa, Homo sapiens
ATLRGSPHSVSKTKYNLYIANYY

SEQ ID NO: 509 - protein, 65 aa, Homo sapiens
LSASLLDRYPASESNNYIFNFVLYMLHFLAGTLFSLFPDFELSPRSATLFPDLRTVQLLSSRPHL

SEQ ID NO: 510 - protein, 23 aa, Homo sapiens
LLDRYPASESNNYIFNFVLYMLH

SEQ ID NO: 511 - protein, 20 aa, Homo sapiens
FPDFELSPRSATLFPDLRTV

SEQ ID NO: 512 - protein, 85 aa, Homo sapiens
NGGFYDVSFKQAGLIEFLCIIYFYPMAHVICGSRFTIVRTIPVHYVGEYFIKSSIWILYRINERTATKKAASDFQKNFRCFLDAF

SEQ ID NO: 513 - protein, 19 aa, Homo sapiens
KQAGLIEFLCIIYFYPMAH

SEQ ID NO: 514 - protein, 23 aa, Homo sapiens
YFIKSSIWILYRINERTATKKAA

SEQ ID NO: 515 - protein, 96 aa, Homo sapiens
  SITE (4): Xaa equals any of the naturally occurring L-amino acids
  SITE (7): Xaa equals any of the naturally occurring L-amino acids
  SITE (9): Xaa equals any of the naturally occurring L-amino acids
SPRXGRXFXTSRKQISGFLEFDMGVLTRELFGVVGMLYILIVGMVTWLDAFVKTHLMVMQNEYILFYVNYTSKLNFFKKFLLKSKDICGASCKFYC

SEQ ID NO: 516 - protein, 56 aa, Homo sapiens [sequence omitted]

SEQ ID NO: 517 - protein, 29 aa, Homo sapiens
IYRYLKIKSKLLIGSGKCQLQPEWLQTSL

SEQ ID NO: 518 - protein, 68 aa, Homo sapiens [sequence omitted]

SEQ ID NO: 519 - protein, 21 aa, Homo sapiens
SKGPRKNGLSMCGSVYSTIWS

SEQ ID NO: 520 - protein, 17 aa, Homo sapiens
QSPNINTRHISKRGLNK

SEQ ID NO: 521 - protein, 19 aa, Homo sapiens
HPQTSAGGFPLHQGLPTVS

SEQ ID NO: 522 - protein, 117 aa, Homo sapiens
  SITE (110): Xaa equals any of the naturally occurring L-amino acids
PSWFPELSPWPLKTLKKRRQMRLRRRGRLCRLSPATTTTADTCRCPARSYRGSGRRPACAQDSPAPPSRPTRRAWEKCALRPKRAAQWSTGVPPSPRSSTTGCCFGTAAXCAEGARR

SEQ ID NO: 523 - protein, 22 aa, Homo sapiens
TTTADTCRCPARSYRGSGRRPA

SEQ ID NO: 524 - protein, 24 aa, Homo sapiens
PSRPTRRAWEKCALRPKRAAQWST

SEQ ID NO: 525 - protein, 173 aa, Homo sapiens; identical to SEQ ID NO: 252
  SITE (76): Xaa equals any of the naturally occurring L-amino acids
  SITE (124): Xaa equals any of the naturally occurring L-amino acids

SEQ ID NO: 526 - protein, 257 aa, Homo sapiens
HPQTSAGGFPLHQGLPTVSMLGSPCLLWLLAVTFLVPRAQPLAPQDFEEEEADETETAWPPLPAVPCDYDHCRHLQVPCKELQRVGPAACLCPGLSSPAQPPDPPRMGEVRIAAEEGRAVVHWCAPFSPVLHYWLLLWDGSEAAQKGPPLNATVRRAELKGLKPGGIYVVCVVAANEAGASRVPQAGGEGLEGADIPAFGPCSRLAVPPNPRTLVHAAVGVGTALALLSCAALVWHFCLRDRWGCPRRAAARAAGAL

SEQ ID NO: 527 - protein, 69 aa, Homo sapiens
IGQLVMKSICHFQRLLSVAIDFASQFLKNYIFSSTHSSKAGFSVVCSLPKWLYTDGMEMVLKITHKLSF

SEQ ID NO: 528 - protein, 24 aa, Homo sapiens
QRLLSVAIDFASQFLKNYIFSSTH

SEQ ID NO: 529 - protein, 65 aa, Homo sapiens
ARGVLNLRNRFECFSIIETVMTIHALLVYACNSKCLWFSISHLHFCLVTLLILTNMTESSFSLKG

SEQ ID NO: 530 - protein, 69 aa, Homo sapiens
LMKTASRMLLLEMVYRAFLIIILRFILIFLFKLNYSKLCPEIPFGLKFFSFVCIKVQIKKTSRKRRPYL

SEQ ID NO: 531 - protein, 6 aa, Homo sapiens
MDDIKI

SEQ ID NO: 532 - protein, 57 aa, Homo sapiens
NFCVSKNTFNRVKRPIKWVKIFANDISCKRLISRIHKEILPFNNKKQPDFKVKKSRK

SEQ ID NO: 533 - protein, 30 aa, Homo sapiens
FNRVKRPIKWVKIFANDISCKRLISRIHKE

SEQ ID NO: 534 - protein, 15 aa, Homo sapiens
ETQMANKYMKRCSTL

SEQ ID NO: 535 - protein, 59 aa, Homo sapiens
VIRELQVKATRRCHYTPIKWSKSKTLISSNADEYVEPTRTLIHCWWKCKIVQPLCKTAW

SEQ ID NO: 536 - protein, 22 aa, Homo sapiens
ATRRCHYTPIKWSKSKTLISSN

SEQ ID NO: 537 - protein, 24 aa, Homo sapiens
SCGSSRRSAKRSLTLKLIDFSHRI

SEQ ID NO: 538 - protein, 25 aa, Homo sapiens
  SITE (3): Xaa equals any of the naturally occurring L-amino acids
  SITE (6): Xaa equals any of the naturally occurring L-amino acids
ATXWDXPGCRNSARGERLHVGDAPW

SEQ ID NO: 539 - protein, 109 aa, Homo sapiens
  SITE (102): Xaa equals any of the naturally occurring L-amino acids
  SITE (105): Xaa equals any of the naturally occurring L-amino acids
ARDERREVLKTLMRLSTQRPQAFLPSQSWFVRLQKAGEGALKQENSLTIQNCLLCLPRVHRQRPTPPQPQRGNTEASVLQTSTEHLPRAAVLLVPNSCSPGXPTXLLSS

SEQ ID NO: 540 - protein, 22 aa, Homo sapiens
ERREVLKTLMRLSTQRPQAFLP

SEQ ID NO: 541 - protein, 25 aa, Homo sapiens
GALKQENSLTIQNCLLCLPRVHRQR

SEQ ID NO: 542 - protein, 21 aa, Homo sapiens
SVLQTSTEHLPRAAVLLVPNS

SEQ ID NO: 543 - protein, 91 aa, Homo sapiens
  SITE (3): Xaa equals any of the naturally occurring L-amino acids
  SITE (6): Xaa equals any of the naturally occurring L-amino acids
ATXWDXPGCRNSARGERLHVGDAPWMFVERWLPCFLVVAVVVWVFACGPVEDKEDSFGWSSYFLASGLPPLLFEASQTRTVRAGRLGVFVC

SEQ ID NO: 544 - protein, 9 aa, Homo sapiens
ALVISNPLL

SEQ ID NO: 545 - protein, 63 aa, Homo sapiens [sequence omitted]

SEQ ID NO: 546 - protein, 27 aa, Homo sapiens
KFCISGHQKYDSHGRETRFEMHKARAS

SEQ ID NO: 547 - protein, 84 aa, Homo sapiens
HTLLEIANPLQAAVLGASSIHPSIHTSTHLMFMGLKWTELHHSPDSVQGAGAAEAAQTRHSLRPGRGRERHDCTLKNLTLFIIC

SEQ ID NO: 548 - protein, 22 aa, Homo sapiens
NPLQAAVLGASSIHPSIHTSTH

SEQ ID NO: 549 - protein, 17 aa, Homo sapiens
SLRPGRGRERHDCTLKN

SEQ ID NO: 550 - protein, 26 aa, Homo sapiens
DVPCFHFTFCHDCKFPEASPASHVEL

SEQ ID NO: 551 - protein, 52 aa, Homo sapiens
AENVHCTPAWETGRDSEDGKGREGMGRDRKGWDGTGLDGTGWEGKRERNVPA

SEQ ID NO: 552 - protein, 26 aa, Homo sapiens
GRDSEDGKGREGMGRDRKGWDGTGLD

SEQ ID NO: 553 - protein, 14 aa, Homo sapiens
TSLGDLWDYNNSSH

SEQ ID NO: 554 - protein, 66 aa, Homo sapiens
DRRIIRTREAAVAVSRERPLHSSLGNRERLRRWEGTGRDGKGQEGMGRDGTGWDGMGREERKKCPS

SEQ ID NO: 555 - protein, 25 aa, Homo sapiens
RPLHSSLGNRERLRRWEGTGRDGKG

SEQ ID NO: 556 - protein, 9 aa, Homo sapiens
NQSWGPMGL

SEQ ID NO: 557 - protein, 59 aa, Homo sapiens
GGGGCSEPRTSIALQPGKQGETPKMGRDGKGWEGTGRDGTGRDWMGRDGKGREKEMSQQ

SEQ ID NO: 558 - protein, 24 aa, Homo sapiens
KQGETPKMGRDGKGWEGTGRDGTG

SEQ ID NO: 559 - protein, 32 aa, Homo sapiens
PVLGTYGTITTPVTELTKGQEKEGGVETVLYE

SEQ ID NO: 560 - protein, 11 aa, Homo sapiens
KIVFIDQKWSK

SEQ ID NO: 561 - protein, 70 aa, Homo sapiens
CSLFWGILFLSRLRIHLFLSLKPCMCLRPIDILSHFLDIFVTSVLSELEKSSLKTTETFSFAVFLLLMMN

SEQ ID NO: 562 - protein, 26 aa, Homo sapiens
LSRLRIHLFLSLKPCMCLRPIDILSH

SEQ ID NO: 563 - protein, 22 aa, Homo sapiens
VLSELEKSSLKTTETFSFAVFL

SEQ ID NO: 564 - protein, 77 aa, Homo sapiens
KIVFIDQKWSKMSNFISITCLVFTILGHLVSLQVAHSSVFEFKTLYVLKTNRYSQSLFRHFCHLSFIRTRKIFLKNN

SEQ ID NO: 565 - protein, 8 aa, Homo sapiens
TLFRYILH

SEQ ID NO: 566 - protein, 58 aa, Homo sapiens
IGCLLATLTGNILCTALESHSVASAHCNLRLLGSSDVHCMNCESKHIIITLDNEPRQF

SEQ ID NO: 567 - protein, 52 aa, Homo sapiens
HYFLRTVSGLSVVPVSLRCCMCPPPCTGPAPATAHSPFDPPALPIQFEYQQA

SEQ ID NO: 568 - protein, 45 aa, Homo sapiens
QLEAEIENLSWKVERADSYDRGDLENQMHIAEQRRRTLLKDFHDT

SEQ ID NO: 569 - protein, 24 aa, Homo sapiens
VPVSLRCCMCPPPCTGPAPATAHS

SEQ ID NO: 570 - protein, 25 aa, Homo sapiens
SWKVERADSYDRGDLENQMHIAEQR

SEQ ID NO: 571 - protein, 14 aa, Homo sapiens
GTSFSVLSLIHDTG

SEQ ID NO: 572 - protein, 90 aa, Homo sapiens
GTSFSVLSLIHDTGMTLYSKLLWLFKGELLFPLVLAYVLLLYIVTKFNYLILKLFPNKIQIKRGSIASNRSLESSASLPARKEEKLLKKF

SEQ ID NO: 573 - protein, 63 aa, Homo sapiens
VLISASTIGSRTSGAQGMEKMTIPTLAVGEPKTPEKSKCSLKQCFSSCNVHIDHLGLLLKCKF

SEQ ID NO: 574 - protein, 23 aa, Homo sapiens
ASTIGSRTSGAQGMEKMTIPTLA

SEQ ID NO: 575 - protein, 27 aa, Homo sapiens
GEPKTPEKSKCSLKQCFSSCNVHIDHL

SEQ ID NO: 576 - protein, 101 aa, Homo sapiens
RIRSQDLAIMTTCFKKYEFSFFVLGFLRRWGATLCLGFTSFAIKFHPSSLCSEKEGKDFSGFALSIHGPERKKEEGWARWLTPVVPVLWEAEVGGSPEVSS

SEQ ID NO: 577 - protein, 22 aa, Homo sapiens
TTCFKKYEFSFFVLGFLRRWGA

SEQ ID NO: 578 - protein, 26 aa, Homo sapiens
SEKEGKDFSGFALSIHGPERKKEEGW

SEQ ID NO: 579 - protein, 86 aa, Homo sapiens
MNECIAKPCMAAFCSCPSCCLPSRPGCSREQRCAFSCEPCHTVEHWVEPMGQGQRQEHTQGSVLPSSHPSRGKATTVHSCCQEPWG

SEQ ID NO: 580 - protein, 27 aa, Homo sapiens
FCSCPSCCLPSRPGCSREQRCAFSCEP

SEQ ID NO: 581 - protein, 23 aa, Homo sapiens
GQRQEHTQGSVLPSSHPSRGKAT

SEQ ID NO: 582 - protein, 139 aa, Homo sapiens [sequence omitted]

SEQ ID NO: 583 - protein, 25 aa, Homo sapiens
GMDCGGFASRRMGGRQHAALSVFLP

SEQ ID NO: 584 - protein, 25 aa, Homo sapiens
LTGKGTSLLSGAARPAGEAAARAGT

SEQ ID NO: 585 - protein, 22 aa, Homo sapiens
LNTYCVPSSALTAVGIGDILKN

SEQ ID NO: 586 - protein, 55 aa, Homo sapiens
TSLSQLWHFCHFWPVKFCCGGCPVHCRMFSSISGLYLLNASAPSLQLNDPKCLQT

SEQ ID NO: 587 - protein, 28 aa, Homo sapiens
WPVKFCCGGCPVHCRMFSSISGLYLLNA

SEQ ID NO: 588 - protein, 314 aa, Homo sapiens
  SITE (88): Xaa equals any of the naturally occurring L-amino acids
  SITE (94): Xaa equals any of the naturally occurring L-amino acids
  SITE (96): Xaa equals any of the naturally occurring L-amino acids
  SITE (102): Xaa equals any of the naturally occurring L-amino acids
  SITE (118): Xaa equals any of the naturally occurring L-amino acids
  SITE (121): Xaa equals any of the naturally occurring L-amino acids
  SITE (236): Xaa equals any of the naturally occurring L-amino acids
MKGVGMKKAGHLVRVGPVGARSSRRQSQKKTVSLAPQSWMKNLKKNSTASLNIVLLHLTGNVYLSQEKRRRLEMCPQNRLKPAKVLSXLRKRTXSXKLSANXSTKRRSPMFRKKEVGXNGXTSNSSWMPFTLQKPYFQKTETPWSLFIRLKISHPFSTLQSQQQRKNLWWAAKREKQGKPRLHTLSGQQMAGYHQQEVLWMTNQRNNCRGVSLKQLRQTAMTNAHTTPRSGRRGAXLQKCLPCLRSLASLRWLKWQPWKMCTEVRGQLRSPMMDSQKKCRSCLYLFPALTSEAPFHCKTLCFTYYPSLVFTEGC

SEQ ID NO: 589 - protein, 305 aa, Homo sapiens
  SITE (4): Xaa equals any of the naturally occurring L-amino acids
  SITE (6): Xaa equals any of the naturally occurring L-amino acids
  SITE (102): Xaa equals any of the naturally occurring L-amino acids
  SITE (103): Xaa equals any of the naturally occurring L-amino acids
  SITE (110): Xaa equals any of the naturally occurring L-amino acids
  SITE (116): Xaa equals any of the naturally occurring L-amino acids
  SITE (132): Xaa equals any of the naturally occurring L-amino acids
  SITE (250): Xaa equals any of the naturally occurring L-amino acids
GTGXTXSGKGNSSDHEGCWNEESWTFSQSGTSGSKKFKKTKPKEDCLLGSAKLDEEFEKKFNSLPQYSPVTFDRKCVPVPRKKKKTGNVSSEPTKTSKGPFXXQKKNLFXKIVSKXKHKKEKPNVPEKGSGXKWSNKQLFLDAIHPTEAIFSEDRNTMEPVHKVKNIPSIFNTPEPTTTQEPLVGSQKRKARKTKITHLVRTADGRVSPAGGTLDDKPKEQLQRSLPKATETDCNDKCSHNTEVGETRSXTPEMPAVSAFFSLAALAEVAAMENVHRGQRSTPLTHDGQPKEMPQLPVLISCADQ

SEQ ID NO: 590 - protein, 20 aa, Homo sapiens
SCRCWALGAGGGQRQWVGRS

SEQ ID NO: 591 - protein, 80 aa, Homo sapiens
TGAQAPKMGARQRKRPLQTRIKNSSKSTLWPPQWVRCGRWWTWPSRKKTSRPRRQLFTSTLSTSASALVWPVSWFSQEGH

SEQ ID NO: 592 - protein, 25 aa, Homo sapiens
MGARQRKRPLQTRIKNSSKSTLWPP

SEQ ID NO: 593 - protein, 23 aa, Homo sapiens
PRRQLFTSTLSTSASALVWPVSW

SEQ ID NO: 594 - protein, 142 aa, Homo sapiens
SCRCWALGAGGGQRQWVGRSMPPLAPQLCRAVFLVPILLLLQVKPLNGSPGPKDGSQTEKTPSADQNQEQFEEHFVASSVGEMWQVVDMAQQEEDQSSKTAAVHKHSFHLSFCFSLASVMVFSGGPLRRTFPNIQLCFMLTH

SEQ ID NO: 595 - protein, 25 aa, Homo sapiens
DGGGKEEGVSCLKISLLCGPWLWLP

SEQ ID NO: 596 - protein, 135 aa, Homo sapiens
HEMGELAICHTRVPFSLPSSAQGVPQNLQGPIGHLAVCTPSSLTSWHFPQKREKWSTVNKRQRFLQFPAPLRNWIPQTPLSLSVSSGPLGSFTVFTLLSLCAWPWCCRDCYKSCCPIPIFNLTAPLCVHTPEPSS

SEQ ID NO: 597 - protein, 23 aa, Homo sapiens
SSAQGVPQNLQGPIGHLAVCTPS

SEQ ID NO: 598 - protein, 28 aa, Homo sapiens
VNKRQRFLQFPAPLRNWIPQTPLSLSVS

SEQ ID NO: 599 - protein, 23 aa, Homo sapiens
CCRDCYKSCCPIPIFNLTAPLCV

SEQ ID NO: 600 - protein, 150 aa, Homo sapiens
DLNVTNEGEGKEVLGQGSTNNEKKCQKATSNTEPRAREAKARHANMGTSDRESPTWSLTAEGLKAKSKMQGKATKGAASTMGSHNQGPHKREIFKHETPSSFPPPSQCQPELLPYKYWATLASGYVPSWLPSVDSYRINTAIKDKNGQDT

SEQ ID NO: 601 - protein, 24 aa, Homo sapiens
VLGQGSTNNEKKCQKATSNTEPRA

SEQ ID NO: 602 - protein, 29 aa, Homo sapiens
RESPTWSLTAEGLKAKSKMQGKATKGAAS

SEQ ID NO: 603 - protein, 22 aa, Homo sapiens
GYVPSWLPSVDSYRINTAIKDK

SEQ ID NO: 604 - protein, 80 aa, Homo sapiens
DGGGKEEGVSCLKISLLCGPWLWLPMVLAAPLVAFPCILLFAFSPSAVRDHVGDSRSDVPIFACLALASLALGSVLLVAF

SEQ ID NO: 605 - protein, 37 aa, Homo sapiens
  SITE (15): Xaa equals any of the naturally occurring L-amino acids
LFRCPIGKAGTPAGXGPEFPGRPTRPVREKELTETFE

SEQ ID NO: 606 - protein, 21 aa, Homo sapiens
  SITE (9): Xaa equals any of the naturally occurring L-amino acids
GKAGTPAGXGPEFPGRPTRPV

SEQ ID NO: 607 - protein, 45 aa, Homo sapiens
FFVFPYPYPFRPLPPIPFPRFPWFRRNFPIPIPESAPTTPLPSEK

SEQ ID NO: 608 - protein, 21 aa, Homo sapiens
PWFRRNFPIPIPESAPTTPLP

SEQ ID NO: 609 - protein, 122 aa, Homo sapiens
  SITE (15): Xaa equals any of the naturally occurring L-amino acids
LFRCPIGKAGTPAGXGPEFPGRPTRPVREKELTETFEMKKVLLLITAILAVAVGFPVSQDQEREKRSISDSDELASGFFVFPYPYPFRPLPPIPFPRFPWFRRNFPIPIPESAPTTPLPSEK

SEQ ID NO: 610 - protein, 61 aa, Homo sapiens
FYPPMTQGKESLPLLALQIFNTTFRPSFAFFSGHRTLFFGVRSPNPPKPRIFLIWLIAVAL

SEQ ID NO: 611 - protein, 31 aa, Homo sapiens
LLALQIFNTTFRPSFAFFSGHRTLFFGVRSP

SEQ ID NO: 612 - protein, 52 aa, Homo sapiens
HLAQTVMMHPQKSFYQVKNTNHSDRGAIEETQILEDRLGQIPLCLESQIWEA

SEQ ID NO: 613 - protein, 28 aa, Homo sapiens
KNTNHSDRGAIEETQILEDRLGQIPLCL

SEQ ID NO: 614 - protein, 73 aa, Homo sapiens
QGCYRRDSNIGRQVRPDSIMLRKPDLGSITHYGSVLGNLNYCDLPQLYRNPSLGNSGMREMFSPFYNPVECHP

SEQ ID NO: 615 - protein, 23 aa, Homo sapiens
PDSIMLRKPDLGSITHYGSVLGN

SEQ ID NO: 616 - protein, 22 aa, Homo sapiens
YRNPSLGNSGMREMFSPFYNPV

SEQ ID NO: 617 - protein, 227 aa, Homo sapiens
  SITE (53): Xaa equals any of the naturally occurring L-amino acids
HEAWLRSAGTREPPREQRTRRRQTAQLALQVPAPSRTPPMATDVFNSKNLAVXAQKKILGKMVSKSIATTLIDDTSSEVLDELYRVTREYTQNKKEAEKIIKNLIKTVIKLAILYRNNQFNQDELALMEKFKKKVHQLAMTVVSFHQVDYTFDRNVLSRLLNECREMLHQIIQRHLTAKSHGRVNNVFDHFSDCEFLAALYNPFGNFKPHLQKLCDGINKMLDEENI

SEQ ID NO: 618 - protein, 52 aa, Homo sapiens
HEAWLRSAGTREPPREQRTRRRQTAQLALQVPAPSRTPPMATDVFNSKNLAV

SEQ ID NO: 619 - protein, 49 aa, Homo sapiens
  SITE (1): Xaa equals any of the naturally occurring L-amino acids
XAQKKILGKMVSKSIATTLIDDTSSEVLDELYRVTREYTQNKKEAEKII

SEQ ID NO: 620 - protein, 51 aa, Homo sapiens
KNLIKTVIKLAILYRNNQFNQDELALMEKFKKKVHQLAMTVVSFHQVDYTF

SEQ ID NO: 621 - protein, 52 aa, Homo sapiens
DRNVLSRLLNECREMLHQIIQRHLTAKSHGRVNNVFDHFSDCEFLAALYNPF

SEQ ID NO: 622 - protein, 23 aa, Homo sapiens
GNFKPHLQKLCDGINKMLDEENI

SEQ ID NO: 623 - protein, 21 aa, Homo sapiens
NSARGLSGGHPFPWLSEGHPF

SEQ ID NO: 624 - protein, 107 aa, Homo sapiens [sequence omitted]

SEQ ID NO: 625 - protein, 20 aa, Homo sapiens
LGILLLGIYTNHIWEMFLAA

SEQ ID NO: 626 - protein, 27 aa, Homo sapiens
KSVKRQINFPSSKDVGCSLEVPKDGPP

SEQ ID NO: 627 - protein, 27 aa, Homo sapiens
GKEWIPLSHRKGWIPLSHMKGWPSLSH

SEQ ID NO: 628 - protein, 47 aa, Homo sapiens
GWASTQPRERMDPAQPQERMDPSQPHERMALTQPWKRMAPTQPSCRI

SEQ ID NO: 629 - protein, 24 aa, Homo sapiens
PAQPQERMDPSQPHERMALTQPWK

SEQ ID NO: 630 - protein, 89 aa, Homo sapiens
NSARGLSGGHPFPWLSEGHPFMWLRGIHPFLWLSGIHSFPWLSGGPSLGTSSEQPTSLEDGKLICLFTDFSGSSFGLFMREAAKNISQM

SEQ ID NO: 631 - protein, 30 aa, Homo sapiens
IANGGGRPIKLNALYKIQNECKIVFTCIDF

SEQ ID NO: 632 - protein, 33 aa, Homo sapiens
MPCIKSKMNAKLFSLVLTLCCMIPISVLFGTCI

SEQ ID NO: 633 - protein, 82 aa, Homo sapiens
IANGGGRPIKLNALYKIQNECKIVFTCIDFMLYDSNLCSVWHLYLILHLCKTFVYCGCVHSSYLISGTVNTQYFIVQTVLLF

SEQ ID NO: 634 - protein, 101 aa, Homo sapiens
QVAMGSLSGLRLAAGSCFRLCERDVSSSLRLTRSSDLKRINGFCTKPQESPGAPSRTYNRVPLHKPTDWQKKILIWSGRFKKEDEIPETVSLEMLDAAKNK

SEQ ID NO: 635 - protein, 25 aa, Homo sapiens
GLRLAAGSCFRLCERDVSSSLRLTR

SEQ ID NO: 636 - protein, 20 aa, Homo sapiens
APSRTYNRVPLHKPTDWQKK

SEQ ID NO: 637 - protein, 23 aa, Homo sapiens
IWSGRFKKEDEIPETVSLEMLDA

SEQ ID NO: 638 - protein, 63 aa, Homo sapiens
MDFAQNHRKVPELHPALTTECLYTNLRIGRKRSSYGQVASKRKMKSQRLSRWRCLMLQRTRCE

SEQ ID NO: 639 - protein, 19 aa, Homo sapiens
KVPELHPALTTECLYTNLR

SEQ ID NO: 640 - protein, 26 aa, Homo sapiens
KRSSYGQVASKRKMKSQRLSRWRCLM

SEQ ID NO: 641 - protein, 12 aa, Homo sapiens
INGFCTKPQESP

SEQ ID NO: 642 - protein, 9 aa, Homo sapiens
RVPLHKPTD

SEQ ID NO: 643 - protein, 8 aa, Homo sapiens
WSGRFKKE

SEQ ID NO: 644 - protein, 9 aa, Homo sapiens
EMLDAAKNK

SEQ ID NO: 645 - protein, 9 aa, Homo sapiens
SYLMIALTV

SEQ ID NO: 646 - protein, 9 aa, Homo sapiens
MVIEGKKAA

SEQ ID NO: 647 - protein, 157 aa, Homo sapiens
QVAMGSLSGLRLAAGSCFRLCERDVSSSLRLTRSSDLKRINGFCTKPQESPGAPSRTYNRVPLHKPTDWQKKILIWSGRFKKEDEIPETVSLEMLDAAKNKMRVKISYLMIALTVVGCIFMVIEGKKAAQRHETLTSLNLEKKARLKEEAAMKAKTE

SEQ ID NO: 648 - protein, 12 aa, Homo sapiens
NSAEQSMLILVT

SEQ ID NO: 649 - protein, 122 aa, Homo sapiens
  SITE (2): Xaa equals any of the naturally occurring L-amino acids
  SITE (5): Xaa equals any of the naturally occurring L-amino acids
RXDRXPVPELPGYEPTRTDISSFKNIYRYAFDFARDKDQRSLDIDTAKSMLALLLGRTWPLFSVFYQYLEQSKYRVMNKDQWYNVLEFSRTVHADLSNYDEDGAWPVLLDEFVEWQKVRQTS

SEQ ID NO: 650 - protein, 28 aa, Homo sapiens
PTRTDISSFKNIYRYAFDFARDKDQRSL

SEQ ID NO: 651 - protein, 29 aa, Homo sapiens
SMLALLLGRTWPLFSVFYQYLEQSKYRVM

SEQ ID NO: 652 - protein, 27 aa, Homo sapiens
FSRTVHADLSNYDEDGAWPVLLDEFVE

SEQ ID NO: 653 - protein, 10 aa, Homo sapiens
IYRYAFDFAR

SEQ ID NO: 654 - protein, 8 aa, Homo sapiens
KDQRSLDI

SEQ ID NO: 655 - protein, 8 aa, Homo sapiens
NVLEFSRT

SEQ ID NO: 656 - protein, 21 aa, Homo sapiens
DLSNYDEDGAWPVLLDEFVEW

SEQ ID NO: 657 - protein, 315 aa, Homo sapiens
  SITE (175): Xaa equals any of the naturally occurring L-amino acids
  SITE (198): Xaa equals any of the naturally occurring L-amino acids
ERTAVSTGEEPALSRSEKDDEDTWERAAAGLGRAGAGWRLCSSACCCLWELGASAEGLPADRDPLPRLPCPPCRGGRKMPVKKKRKSPGVAAAVAEDGGLKKCKISSYCRSQPPARLISGEEHFSSKKCLAWFYEYAGPDEVVGPEGMEKFCEDIGVEPENIIMLVLAWKLEAEXMGFFTKEEWLKGMTSLQCDCTEXLQNKFDFLRSQLNDISSFKNIYRYAFDFARDKDQRSLDIDTAKSMLALLLGRTWPLFSVFYQYLEQSKYRVMNKDQWYNVLEFSRTVHADLSNYDEDGAWPVLLDEFVEWQKVRQTS

SEQ ID NO: 658 - protein, 68 aa, Homo sapiens [sequence omitted]

SEQ ID NO: 659 - protein, 20 aa, Homo sapiens
GSCLSLLALCSPQARPGPRT

SEQ ID NO: 660 - protein, 23 aa, Homo sapiens
HFSPCARFSPVGPSAVPFAATPL

SEQ ID NO: 661 - protein, 92 aa, Homo sapiens
  SITE (43): Xaa equals any of the naturally occurring L-amino acids
  SITE (80): Xaa equals any of the naturally occurring L-amino acids
AIEERNKSRLTQQASEPTGSPRYLHEQHPGSRSQMDCGSLTMXCPPPRVRDDRTSARGVPRQAAPDIVGGRPSSRACVSXPACAPSAAVFPY

SEQ ID NO: 662 - protein, 24 aa, Homo sapiens
LTQQASEPTGSPRYLHEQHPGSRS

SEQ ID NO: 663 - protein, 25 aa, Homo sapiens
SARGVPRQAAPDIVGGRPSSRACVS

SEQ ID NO: 664 - protein, 164 aa, Homo sapiens
MSTRRLGVAVAVLGGFLYAVGGSDGTSPLNTVERYNPQENRWHTIAPMGTRRKHLGCAVYQDMIYAVGGRDDTTELSSAERYNPRTNQWSPVVAMTSRRSGVGLAVVNGQLMAVGGFDGTTYLKTIEVFDPDANTWRLYGGMNYRRLGGGVGVIKMTHCESHIW

SEQ ID NO: 665 - protein, 142 aa, Homo sapiens
SDGTSPLNTVERYNPQENRWHTIAPMGTRRKHLGCAVYQDMIYAVGGRDDTTELSSAERYNPRTNQWSPVVAMTSRRSGVGLAVVNGQLMAVGGFDGTTYLKTIEVFDPDANTWRLYGGMNYRRLGGGVGVIKMTHCESHIW

SEQ ID NO: 666 - protein, 64 aa, Homo sapiens
ELSGLVIITAWIILCHSSSKNPVGGRIQLAIAIVITLFPFISWVYIYINKEMRSSWPTHCKTVI

SEQ ID NO: 667 - protein, 57 aa, Homo sapiens
QCPQGTETEAGVSVPPRKEGGGPYVAGLTAPHVAGLTAPRRVLRAMAPALWRACNGL

SEQ ID NO: 668 - protein, 32 aa, Homo sapiens
HSSSKNPVGGRIQLAIAIVITLFPFISWVYIY

SEQ ID NO: 669 - protein, 32 aa, Homo sapiens
RKEGGGPYVAGLTAPHVAGLTAPRRVLRAMAP

SEQ ID NO: 670 - protein, 14 aa, Homo sapiens
PRVRKTPHLSASGK

SEQ ID NO: 671 - protein, 59 aa, Homo sapiens
YYYSMLKICHITILETLSDRTPRKFAKKCYILYIKLSDSSVEKVAYTLLLLIPAAIEKK

SEQ ID NO: 672 - protein, 32 aa, Homo sapiens
TILETLSDRTPRKFAKKCYILYIKLSDSSVEK
